(19) United States
(12) Patent Application Publication
(10) Pub. No.: US 2006/0246433 A1
(43) Pub. Date: Nov. 2, 2006

(54) Method and nucleic acids for the analysis of a colon cell proliferative disorder

(75) Inventors: Peter Adorjan, Berlin (DE); Matthias Burger, Berlin (DE); Sabine Maier, Berlin (DE); Inko Nimmrich, Berlin (DE); Evelyne Becker, Berlin (DE); Ralf Lesche, Berlin (DE); Tamas Rujan, Berlin (DE); Armin Schmitt, Breitengupbach (DK)

Correspondence Address: DAVIS WRIGHT TREMAINE, LLP, 2600 CENTURY SQUARE, 1501 FOURTH AVENUE, SEATTLE, WA, 98101-1688, US

(73) Assignee: Epigenomics AG, Berlin (DE)

(21) Appl. No.: 10/506,111

(22) PCT Filed: Feb. 27, 2003
(86) PCT No.: PCT/EP03/02035

§ 371 Date: Sep. 16, 2005

(30) Foreign Application Priority Data
Feb. 27, 2002 (EP) 02002551.4

(51) Int. Cl. C12Q 1/68; C12M 1/34

(52) U.S. Cl. 435/6; 435/287.2

(57) ABSTRACT

The present invention relates to modified and genomic sequences, to oligonucleotides and/or PNA-oligomers for detecting the cytosine methylation state of genomic DNA, as well as to a method for ascertaining genetic and/or epigenetic parameters of genes for use in the differentiation, diagnosis, treatment and/or monitoring of colon cell proliferative disorders, or the predisposition to colon cell proliferative disorders.

### FIELD OF THE INVENTION

[0001] The levels of observation that have been studied by the methodological developments of recent years in molecular biology, are the genes themselves, the translation of these genes into RNA, and the resulting proteins. The question of which gene is switched on at which point in the course of the development of an individual, and how the activation and inhibition of specific genes in specific cells and tissues are controlled is correlatable to the degree and character of the methylation of the genes or of the genome. In this respect, pathogenic conditions may manifest themselves in a changed methylation pattern of individual genes or of the genome.

[0002] Colorectal cancer is the fourth leading cause of cancer mortality in men and women, although ranking third in frequency in men and second in women. The 5-year survival rate is 61% over all stages with early detection being a prerequisite for curative therapy of the disease. Up to 95% of all colorectal cancers are adenocarcinomas of varying differentiation grades.

[0003] Sporadic colon cancer develops in a multistep process starting with the pathologic transformation of normal colonic epithelium to an adenoma which consecutively progresses to invasive cancer. The progression rate of benign colonic adenomas depends strongly on their histologic appearance: whereas tubular-type adenomas tend to progress to malignant tumors very rarely, villous adenomas, particularly if larger than 2 cm in diameter, have a significant malignant potential.

[0004] During progression from benign proliferative lesions to malignant neoplasms several genetic and epigenetic alterations occur. Somatic mutation of the APC gene seems to be one of the earliest events in 75 to 80% of colorectal adenomas and carcinomas. Activation of K-RAS is thought to be a critical step in the progression towards a malignant phenotype. Consecutively, mutations in other oncogenes as well as alterations leading to inactivation of tumour suppressor genes accumulate.

[0005] Aberrant DNA methylation within CpG islands is among the earliest and most common alterations in human malignancies leading to abrogation or overexpression of a broad spectrum of genes. In addition, abnormal methylation has been shown to occur in CpG rich regulatory elements in intronic and coding parts of genes for certain tumours. In contrast to the specific hypermethylation of tumour suppressor genes, an overall hypomethylation of DNA can be observed in tumour cells. This decrease in global methylation can be detected early, far before the development of frank tumour formation. Also, correlation between hypomethylation and increased gene expression was reported for many oncogenes. In colon cancer, aberrant DNA methylation constitutes one of the most prominent alterations and inactivates many tumor suppressor genes such as p14ARF, p16INK4a, THBS1, MINT2, and MINT31 and DNA mismatch repair genes such as hMLH1.

[0006] In the molecular evolution of colorectal cancer, DNA methylation errors have been suggested to play two distinct roles. In normal colonic mucosa cells, methylation errors accumulate as a function of age or as time-dependent events predisposing these cells to neoplastic transformation. For example, hypermethylation of several loci could be shown to be already present in adenomas, particularly in the tubulovillous and villous subtype. At later stages, increased DNA methylation of CpG islands plays an important role in a subset of tumours affected by the so called CpG island methylator phenotype (CIMP). Most CIMP+ tumours, which constitute about 15% of all sporadic colorectal cancers, are characterised by microsatellite instability (MIN) due to hypermethylation of the hMLH1 promoter and other DNA mismatch repair genes. By contrast, CIMP− colon cancers evolve along a more classic genetic instability pathway (CIN), with a high rate of p53 mutations and chromosomal changes.

[0007] However, the molecular subtypes do not only show varying frequencies regarding molecular alterations. According to the presence of either micro satellite instability or chromosomal aberrations, colon cancer can be subclassified into two classes, which also exhibit significant clinical differences. Almost all MIN tumours originate in the proximal colon (ascending and transversum), whereas 70% of CIN tumours are located in the distal colon and rectum. This has been attributed to the varying prevalence of different carcinogens in different sections of the colon. Methylating carcinogens, which constitute the prevailing carcinogen in the proximal colon have been suggested to play a role in the pathogenesis of MIN cancers, whereas CIN tumours are thought to be more frequently caused by adduct-forming carcinogens, which occur more frequently in distal parts of the colon and rectum. Moreover, MIN tumours have a better prognosis than do tumours with a CIN phenotype and respond better to adjuvant chemotherapy.

[0008] The identification of markers for the differentiation of colon carcinoma as well as for early detection are main goals of current research.

[0009] 5-methylcytosine is the most frequent covalent base modification in the DNA of eukaryotic cells. It plays a role, for example, in the regulation of the transcription, in genetic imprinting, and in tumorigenesis. Therefore, the identification of 5-methylcytosine as a component of genetic information is of considerable interest. However, 5-methylcytosine positions cannot be identified by sequencing since 5-methylcytosine has the same base pairing behaviour as cytosine. Moreover, the epigenetic information carried by 5-methylcytosine is completely lost during PCR amplification.

[0010] A relatively new and currently the most frequently used method for analysing DNA for 5-methylcytosine is based upon the specific reaction of bisulfite with cytosine which, upon subsequent alkaline hydrolysis, is converted to uracil which corresponds to thymidine in its base pairing behaviour. However, 5-methylcytosine remains unmodified under these conditions. Consequently, the original DNA is converted in such a manner that methylcytosine, which originally could not be distinguished from cytosine by its hybridisation behaviour, can now be detected as the only remaining cytosine using “normal” molecular biological techniques, for example, by amplification and hybridisation or sequencing. All of these techniques are based on base pairing which can now be fully exploited. In terms of sensitivity, the prior art is defined by a method which encloses the DNA to be analysed in an agarose matrix, thus preventing the diffusion and renaturation of the DNA (bisulfite only reacts with single-stranded DNA), and which replaces all precipitation and purification steps with fast dialysis (Olek A, Oswald J, Walter J. A modified and improved method for bisulphite based cytosine methylation analysis. Nucleic Acids Res. 1996 Dec. 15;24(24):5064-6). Using this method, it is possible to analyse individual cells, which illustrates the potential of the method. However, currently only individual regions of a length of up to approximately 3000 base pairs are analysed, a global analysis of cells for thousands of possible methylation events is not possible. However, this method cannot reliably analyse very small fragments from small sample quantities either. These are lost through the matrix in spite of the diffusion protection.

[0011] An overview of the further known methods of detecting 5-methylcytosine may be gathered from the following review article: Rein, T., DePamphilis, M. L., Zorbas, H., Nucleic Acids Res. 1998, 26, 2255.

[0012] To date, barring few exceptions (e.g., Zeschnigk M, Lich C, Buiting K, Doerfler W, Horsthemke B. A single-tube PCR test for the diagnosis of Angelman and Prader-Willi syndrome based on allelic methylation differences at the SNRPN locus. Eur J Hum Genet. 1997 March-April;5(2):94-8) the bisulfite technique is only used in research. Always, however, short, specific fragments of a known gene are amplified subsequent to a bisulfite treatment and either completely sequenced (Olek A, Walter J. The pre-implantation ontogeny of the H19 methylation imprint. Nat Genet. 1997 November;17(3):275-6) or individual cytosine positions are detected by a primer extension reaction (Gonzalgo M L, Jones P A. Rapid quantitation of methylation differences at specific sites using methylation-sensitive single nucleotide primer extension (Ms-SNuPE). Nucleic Acids Res. 1997 Jun. 15;25(12):2529-31, WO 95/00669) or by enzymatic digestion (Xiong Z, Laird P W. COBRA: a sensitive and quantitative DNA methylation assay. Nucleic Acids Res. 1997 Jun. 15;25(12):2532-4). In addition, detection by hybridisation has also been described (Olek et al., WO 99/28498).

[0013] Further publications dealing with the use of the bisulfite technique for methylation detection in individual genes are: Grigg G, Clark S. Sequencing 5-methylcytosine residues in genomic DNA. Bioessays. 1994 June;16(6):431-6, 431; Zeschnigk M, Schmitz B, Dittrich B, Buiting K, Horsthemke B, Doerfler W. Imprinted segments in the human genome: different DNA methylation patterns in the Prader-Willi/Angelman syndrome region as determined by the genomic sequencing method. Hum Mol Genet. 1997 March;6(3):387-95; Feil R, Charlton J, Bird A P, Walter J, Reik W. Methylation analysis on individual chromosomes: improved protocol for bisulphite genomic sequencing. Nucleic Acids Res. 1994 Feb. 25;22(4):695-6; Martin V, Ribieras S, Song-Wang X, Rio M C, Dante R. Genomic sequencing indicates a correlation between DNA hypomethylation in the 5′ region of the pS2 gene and its expression in human breast cancer cell lines. Gene. 1995 May 19;157(1-2):261-4; WO 97/46705 and WO 95/15373.

[0014] An overview of the Prior Art in oligomer array manufacturing can be gathered from a special edition of Nature Genetics (Nature Genetics Supplement, Volume 21, January 1999), published in January 1999, and from the literature cited therein.

[0015] Fluorescently labelled probes are often used for the scanning of immobilised DNA arrays. The simple attachment of Cy3 and Cy5 dyes to the 5′-OH of the specific probe are particularly suitable for fluorescence labels. The detection of the fluorescence of the hybridised probes may be carried out, for example via a confocal microscope. Cy3 and Cy5 dyes, besides many others, are commercially available.

[0016] Matrix Assisted Laser Desorption Ionization Mass Spectrometry (MALDI-TOF) is a very efficient development for the analysis of biomolecules (Karas M, Hillenkamp F. Laser desorption ionisation of proteins with molecular masses exceeding 10,000 daltons. Anal Chem. 1988 Oct. 15;60(20):2299-301). An analyte is embedded in a light-absorbing matrix. The matrix is evaporated by a short laser pulse thus transporting the analyte molecule into the vapour phase in an unfragmented manner. The analyte is ionised by collisions with matrix molecules. An applied voltage accelerates the ions into a field-free flight tube. Due to their different masses, the ions are accelerated at different rates. Smaller ions reach the detector sooner than bigger ones.

[0017] MALDI-TOF spectrometry is excellently suited to the analysis of peptides and proteins. The analysis of nucleic acids is somewhat more difficult (Gut I G, Beck S. DNA and Matrix Assisted Laser Desorption Ionisation Mass Spectrometry. Current Innovations and Future Trends. 1995, 1; 147-57). The sensitivity to nucleic acids is approximately 100 times worse than to peptides and decreases disproportionally with increasing fragment size. For nucleic acids having a multiply negatively charged backbone, the ionisation process via the matrix is considerably less efficient. In MALDI-TOF spectrometry, the selection of the matrix plays an eminently important role. For the desorption of peptides, several very efficient matrixes have been found which produce a very fine crystallisation. There are now several responsive matrixes for DNA, however, the difference in sensitivity has not been reduced. The difference in sensitivity can be reduced by chemically modifying the DNA in such a manner that it becomes more similar to a peptide. Phosphorothioate nucleic acids in which the usual phosphates of the backbone are substituted with thiophosphates can be converted into a charge-neutral DNA using simple alkylation chemistry (Gut I G, Beck S. A procedure for selective DNA alkylation and detection by mass spectrometry. Nucleic Acids Res. 1995 Apr. 25;23(8):1367-73). The coupling of a charge tag to this modified DNA results in an increase in sensitivity to the same level as that found for peptides. A further advantage of charge tagging is the increased stability of the analysis against impurities which make the detection of unmodified substrates considerably more difficult.

[0018] Genomic DNA is obtained from DNA of cell, tissue or other test samples using standard methods. This standard methodology is found in references such as Sambrook, Fritsch and Maniatis eds., Molecular Cloning: A Laboratory Manual, 1989.

### DESCRIPTION

[0019] The invention provide a method for the analysis of biological samples for features associated with the development of colon cell proliferative disorders, characterised in that the nucleic acid of at least one member of the group comprising MDR1, APOC2, CACNA1G, EGR4, AR, RB1, GPIb beta, MYOD1, WT1, HLA-F, ELK1, APC, BCL2, CALCA, CDH1, CDKN1A, CDKN1B (p27 Kip1), CDKN2a, CDKN2B, CD44, CSPG2, DAPK1, EGFR, EYA4, GSTP1, GTBP/MSH6, HIC-1, HRAS, IGF2, LKB1, MGMT, MLH1, MNCA9, MSH3, MYC, N33, PAX6, PGR, PTEN, RARB, SFN, S100A2, TGFBR2, TIMP3, TP53, TP73, VHL, CDKN1C, CAV1, CDH13, DRG1, PTGS2, THBS1, TPEF (=TMEFF2; =HPP1), DNMT1, CEA, MB, PCNA, CDC2, ESR1, CASP8, RASSF1, MSH4, MSH5 is/are contacted with a reagent or series of reagents capable of distinguishing between methylated and non methylated CpG dinucleotides within the genomic sequence of interest.

[0020] The present invention makes available a method for ascertaining genetic and/or epigenetic parameters of genomic DNA. The method is for use in the improved diagnosis, treatment and monitoring of colon cell proliferative disorders, more specifically by enabling the improved identification of and differentiation between subclasses of said disorder and the genetic predisposition to said disorders. The invention presents improvements over the state of the art in that it enables a highly specific classification of colon carcinomas, thereby allowing for improved and informed treatment of patients.

[0021] In a particularly preferred embodiment the present invention makes available methods and nucleic acids that allow the differentiation between colon carcinoma, colon adenoma and normal colon tissue.

[0022] Furthermore, the method enables the analysis of cytosine methylations and single nucleotide polymorphisms.

[0023] The genes that form the basis of the present invention can be used to form a “gene panel”, i.e. a collection comprising the particular genetic sequences of the present invention and/or their respective informative methylation sites. The formation of gene panels allow for a quick and specific analysis of the disorders they are related with. The gene panels described in this invention can be used with surprisingly high efficiency for the diagnosis, treatment and monitoring of and the analysis of colon cell proliferative disorders as described herein. The use of multiple CpG sites from a diverse array of genes, allows for a relatively high degree of sensitivity and specificity in comparison to single gene diagnostic and detection tools. Furthermore, the panel as described herein may be adapted for use in the analysis of many aspects of colon cell proliferative disorders.

[0024] In a preferred embodiment, the method comprises the following steps:

[0025] In the first step of the method the genomic DNA sample must be isolated from tissue or cellular sources. Such sources may include colon tissue samples, cell lines, histological slides, body fluids, or tissue embedded in paraffin. Extraction may be by means that are standard to one skilled in the art, these include the use of detergent lysates, sonification and vortexing with glass beads. Once the nucleic acids have been extracted the genomic double stranded DNA is used in the analysis.

[0026] In a preferred embodiment the DNA may be cleaved prior to the next step of the method, this may be by any means standard in the state of the art, in particular, but not limited to, with restriction endonucleases.

[0027] In the second step of the method, the genomic DNA sample is treated in such a manner that cytosine bases which are unmethylated at the 5′-position are converted to uracil, thymine, or another base which is dissimilar to cytosine in terms of hybridisation behaviour. This will be understood as ‘pretreatment’ hereinafter.

[0028] The above described treatment of genomic DNA is preferably carried out with bisulfite (sulfite, disulfite) and subsequent alkaline hydrolysis which results in a conversion of non-methylated cytosine nucleobases to uracil or to another base which is dissimilar to cytosine in terms of base pairing behaviour. If bisulfite solution is used for the reaction, then an addition takes place at the non-methylated cytosine bases. Moreover, a denaturating reagent or solvent as well as a radical interceptor must be present. A subsequent alkaline hydrolysis then gives rise to the conversion of non-methylated cytosine nucleobases to uracil. The chemically converted DNA is then used for the detection of methylated cytosines.

[0029] Fragments of the pretreated DNA are amplified, using sets of primer oligonucleotides according to SEQ ID NO: 389 to SEQ ID NO: 518, and a, preferably heat-stable, polymerase. Because of statistical and practical considerations, preferably more than ten different fragments having a length of 100-2000 base pairs are amplified. The amplification of several DNA segments can be carried out simultaneously in one and the same reaction vessel. Usually, the amplification is carried out by means of a polymerase chain reaction (PCR).

[0030] The method may also be enabled by the use of alternative primers, the design of such primers is obvious to one skilled in the art. These should include at least two oligonucleotides whose sequences are each reverse complementary or identical to an at least 18 base-pair long segment of the base sequences specified in the appendix (SEQ ID NO: 133 to SEQ ID NO: 388). Said primer oligonucleotides are preferably characterised in that they do not contain any CpG dinucleotides. In a particularly preferred embodiment of the method, the sequence of said primer oligonucleotides are designed so as to selectively anneal to and amplify, only the colon tissue specific DNA of interest, thereby minimising the amplification of background or non relevant DNA. In the context of the present invention, background DNA is taken to mean genomic DNA which does not have a relevant tissue specific methylation pattern, in this case, the relevant tissue being colon, both healthy and diseased.

[0031] According to the present invention, it is preferred that at least one primer oligonucleotide is bound to a solid phase during amplification. The different oligonucleotide and/or PNA-oligomer sequences can be arranged on a plane solid phase in the form of a rectangular or hexagonal lattice, the solid phase surface preferably being composed of silicon, glass, polystyrene, aluminium, steel, iron, copper, nickel, silver, or gold, it being possible for other materials such as nitrocellulose or plastics to be used as well.

[0032] The fragments obtained by means of the amplification can carry a directly or indirectly detectable label. Preferred are labels in the form of fluorescence labels, radionuclides, or detachable molecule fragments having a typical mass which can be detected in a mass spectrometer, it being preferred that the fragments that are produced have a single positive or negative net charge for better detectability in the mass spectrometer. The detection may be carried out and visualised by means of matrix assisted laser desorption/ionisation mass spectrometry (MALDI) or using electron spray mass spectrometry (ESI).

[0033] The amplificates obtained in the second step of the method are subsequently hybridised to an array or a set of oligonucleotides and/or PNA probes. In this context, the hybridisation preferably takes place in the manner described as follows. The set of probes used during the hybridisation is preferably composed of at least 10 oligonucleotides or PNA-oligomers. However, it is understood and as well claimed, that the process can be conducted using only one Oligonucleotide or PNA probe. In the process, the amplificates hybridise to oligonucleotides previously bonded to a solid phase. In a particularly preferred embodiment, the oligonucleotides are taken from the group comprising SEQ ID NO: 519 to SEQ ID NO: 1030. In a further preferred embodiment the oligonucleotides are taken from the group comprising SEQ ID NO: 895 to SEQ ID NO: 1030. The non-hybridised fragments are subsequently removed. Said oligonucleotides contain at least one base sequence having a length of 10 nucleotides which is reverse complementary or identical to a segment of the base sequences specified in the appendix, the segment containing at least one CpG or TpG dinucleotide. In a further preferred embodiment the cytosine of the CpG dinucleotide, or in the case of TpG, the thiamine, is the 5^{th} to 9^{th} nucleotide from the 5′-end of the 10-mer. One oligonucleotide exists for each CpG or TpG dinucleotide.

[0034] In the fifth step of the method, the non-hybridised amplificates are removed.

[0035] In the final step of the method, the hybridised amplificates are detected. In this context, it is preferred that labels attached to the amplificates are identifiable at each position of the solid phase at which an oligonucleotide sequence is located.

[0036] According to the present invention, it is preferred that the labels of the amplificates are fluorescence labels, radionuclides, or detachable molecule fragments having a typical mass which can be detected in a mass spectrometer. The mass spectrometer is preferred for the detection of the amplificates, fragments of the amplificates or of probes which are complementary to the amplificates, it being possible for the detection to be carried out and visualised by means of matrix assisted laser desorption/ionisation mass spectrometry (MALDI) or using electron spray mass spectrometry (ESI). The produced fragments may have a single positive or negative net charge for better detectability in the mass spectrometer.

[0037] The aforementioned method is preferably used for ascertaining genetic and/or epigenetic parameters of genomic DNA.

[0038] In order to enable this method, the invention further provides the modified DNA of genes MDR1, APOC2, CACNA1G, EGR4, AR, RB1, GPIb beta, MYOD1, WT1, HLA-F, ELK1, APC, BCL2, CALCA, CDH1, CDKN1A, CDKN1B (p27 Kip1), CDKN2a, CDKN2B, CD44, CSPG2, DAPK1, EGFR, EYA4, GSTP1, GTBP/MSH6, HIC-1, HRAS, IGF2, LKB1, MGMT, MLH1, MNCA9, MSH3, MYC, N33, PAX6, PGR, PTEN, RARB, SFN, S100A2, TGFBR2, TIMP3, TP53, TP73, VHL, CDKN1C, CAV1, CDH13, DRG1, PTGS2, THBS1, TPEF (=TMEFF2; =HPP1), DNMT1, CEA, MB, PCNA, CDC2, ESR1, CASP8, RASSF1, MSH4, MSH5 as well as oligonucleotides and/or PNA-oligomers for detecting cytosine methylations within said genes. The present invention is based on the discovery that genetic and epigenetic parameters and, in particular, the cytosine methylation patterns of genomic DNA are particularly suitable for improved diagnosis, treatment and monitoring of colon cell proliferative disorders. Furthermore, the invention enables the differentiation between different subclasses of colon cell proliferative disorders or detection of a predisposition to colon cell proliferative disorders.

[0039] The nucleic acids according to the present invention can be used for the analysis of genetic and/or epigenetic parameters of genomic DNA.

[0040] This objective is achieved according to the present invention using a nucleic acid containing a sequence of at least 18 bases in length of the pretreated genomic DNA according to one of SEQ ID NO: 133 to SEQ ID NO: 388 and sequences complementary thereto.

[0041] The modified nucleic acid could heretofore not be connected with the ascertainment of disease relevant genetic and epigenetic parameters.

[0042] The object of the present invention is further achieved by an oligonucleotide or oligomer for the analysis of pretreated DNA, for detecting the genomic cytosine methylation state, said oligonucleotide containing at least one base sequence having a length of at least 10 nucleotides which hybridises to a pretreated genomic DNA according to SEQ ID NO: 133 through to SEQ ID NO: 388. The oligomer probes according to the present invention constitute important and effective tools which, for the first time, make it possible to ascertain specific genetic and epigenetic parameters during the analysis of biological samples for features associated with the development of colon cell proliferative disorders. Said oligonucleotides allow the improved diagnosis, treatment and monitoring of colon cell proliferative disorders and detection of the predisposition to said disorders. Furthermore, they allow the differentiation of different subclasses of colon cell proliferative disorders. The base sequence of the oligomers preferably contains at least one CpG or TpG dinucleotide. The probes may also exist in the form of a PNA (peptide nucleic acid) which has particularly preferred pairing properties. Particularly preferred are oligonucleotides according to the present invention in which the cytosine of the CpG dinucleotide is the 5^{th}-9^{th} nucleotide from the 5′-end of the 13-mer; in the case of PNA-oligomers, it is preferred for the cytosine of the CpG dinucleotide to be the 4^{th}-6^{th} nucleotide from the 5′-end of the 9-mer.

[0043] The oligomers according to the present invention are normally used in so called “sets” which contain at least one oligomer for each of the CpG dinucleotides within SEQ ID NO: 133 through SEQ ID NO: 388. Preferred is a set which contains at least one oligomer for each of the CpG dinucleotides, from SEQ ID NO: 519 to SEQ ID NO: 1030. Further preferred is a set comprising SEQ ID NO: 895 to SEQ ID NO: 1030.

[0044] In the case of the sets of oligonucleotides according to the present invention, it is preferred that at least one oligonucleotide is bound to a solid phase. It is further preferred that all the oligonucleotides of one set are bound to a solid phase.

[0045] The present invention moreover relates to a set of preferably at least 10 n (oligonucleotides and/or PNA-oligomers) used for detecting the cytosine methylation state of genomic DNA using treated versions of said genomic DNA (according to SEQ ID NO: 133 to SEQ ID NO: 388 and sequences complementary thereto). However, it is understood and as well claimed, that the process can be conducted using only one Oligonucleotide or PNA oligomer. These probes enable improved diagnosis, treatment and monitoring of colon cell proliferative disorders. In particular they enable the differentiation between different sub classes of colon cell proliferative disorders and the detection of a predisposition to said disorders. In a particularly preferred embodiment the set comprises SEQ ID NO: 519 to SEQ ID NO: 1030.

[0046] The set of oligomers may also be used for detecting single nucleotide polymorphisms (SNPs) using pretreated genomic DNA according to one of SEQ ID NO: 133 to SEQ ID NO: 388.

[0047] According to the present invention, it is preferred that an arrangement of different oligonucleotides and/or PNA-oligomers (a so-called “array”) made available by the present invention is present in a manner that it is likewise bound to a solid phase. This array of different oligonucleotide- and/or PNA-oligomer sequences can be characterised in that it is arranged on the solid phase in the form of a rectangular or hexagonal lattice. The solid phase surface is preferably composed of silicon, glass, polystyrene, aluminium, steel, iron, copper, nickel, silver, or gold. However, nitrocellulose as well as plastics such as nylon which can exist in the form of pellets or also as resin matrices are suitable alternatives.

[0048] Therefore, a further subject matter of the present invention is a method for manufacturing an array fixed to a carrier material for the improved diagnosis, treatment and monitoring of colon cell proliferative disorders, the differentiation between different subclasses of colon cell proliferative disorders and/or detection of the predisposition to colon cell proliferative disorders. In said method at least one oligomer according to the present invention is coupled to a solid phase. Methods for manufacturing such arrays are known, for example, from patent U.S. Pat. No. 5,744,305 by means of solid-phase chemistry and photolabile protecting groups.

[0049] A further subject matter of the present invention relates to a DNA chip for the improved diagnosis, treatment and monitoring of colon cell proliferative disorders. Furthermore the DNA chip enables detection of the predisposition to colon cell proliferative disorders and the differentiation between different subclasses of colon cell proliferative disorders. The DNA chip contains at least one nucleic acid according to the present invention. DNA chips are known, for example, in patent U.S. Pat. No. 5,837,832.

[0050] Moreover, a subject matter of the present invention is a kit which may be composed, for example, of a bisulfite-containing reagent, a set of primer oligonucleotides containing at least two oligonucleotides whose sequences in each case correspond or are complementary to a 18 base long segment of the base sequences specified in the appendix (SEQ ID NO: 133 to SEQ ID NO: 388), oligonucleotides and/or PNA-oligomers as well as instructions for carrying out and evaluating the described method. However, a kit along the lines of the present invention can also contain only part of the aforementioned components.

[0051] The oligomers according to the present invention or arrays thereof as well as a kit according to the present invention are intended to be used for the improved diagnosis, treatment and monitoring of colon cell proliferative disorders. Furthermore the use of said inventions extends to the differentiation between different subclasses of colon cell proliferative disorders and detection of the predisposition to colon cell proliferative disorders. According to the present invention, the method is preferably used for the analysis of important genetic and/or epigenetic parameters within genomic DNA, in particular for use in improved diagnosis, treatment and monitoring of colon cell proliferative disorders, detection of the predisposition to said disorders and the differentiation between subclasses of said disorders.

[0052] The methods according to the present invention are used, for example, for improved diagnosis, treatment and monitoring of colon cell proliferative disorders progression, detection of the predisposition to said disorders and the differentiation between subclasses of said disorders. A further embodiment of the invention is a method for the analysis of the methylation status of genomic DNA without the need for pretreatment. In the first step of the method the genomic DNA sample must be isolated from tissue or cellular sources. Such sources may include cell lines, histological slides, body fluids, or tissue embedded in paraffin. Extraction may be by means that are standard to one skilled in the art, these include the use of detergent lysates, sonification and vortexing with glass beads. Once the nucleic acids have been extracted the genomic double stranded DNA is used in the analysis.

[0053] In a preferred embodiment the DNA may be cleaved prior to the treatment, this may be any means standard in the state of the art, in particular with restriction endonucleases. In the second step, the DNA is then digested with one or more methylation sensitive restriction enzymes. The digestion is carried out such that hydrolysis of the DNA at the restriction site is informative of the methylation status of a specific CpG dinucleotide.

[0054] In the third step the restriction fragments are amplified. In a preferred embodiment this is carried out using a polymerase chain reaction.

[0055] In the final step the amplificates are detected. The detection may be by any means standard in the art, for example, but not limited to, gel electrophoresis analysis, hybridisation analysis, incorporation of detectable tags within the PCR products, DNA array analysis, MALDI or ESI analysis.

[0056] The present invention moreover relates to the diagnosis and/or prognosis of events which are disadvantageous or relevant to patients or individuals in which important genetic and/or epigenetic parameters within genomic DNA, said parameters obtained by means of the present invention may be compared to another set of genetic and/or epigenetic parameters, the differences serving as the basis for the diagnosis and/or prognosis of events which are disadvantageous or relevant to patients or individuals.

[0057] In the context of the present invention the term “hybridisation” is to be understood as a bond of an oligonucleotide to a completely complementary sequence along the lines of the Watson-Crick base pairings in the sample DNA, forming a duplex structure.

[0058] In the context of the present invention, “genetic parameters” are mutations and polymorphisms of genomic DNA and sequences further required for their regulation. To be designated as mutations are, in particular, insertions, deletions, point mutations, inversions and polymorphisms and, particularly preferred, SNPs (single nucleotide polymorphisms).

[0059] In the context of the present invention “methylation state analysis” is taken to mean the analysis of cytosines within a nucleic acid in order to ascertain whether they are methylated or not. In the context of the present invention, “epigenetic parameters” are, in particular, cytosine methylations and further modifications of DNA bases of genomic DNA and sequences further required for their regulation. Further epigenetic parameters include, for example, the acetylation of histones which, cannot be directly analysed using the described method but which, in turn, correlates with the DNA methylation.

[0060] In the following, the present invention will be explained in greater detail on the basis of the sequences and examples without being limited thereto.

[0061] SEQ ID NO: 1 to SEQ ID NO: 64 represent 5′ and/or regulatory regions of the genomic DNA of genes MDR1, APOC2, CACNA1G, EGR4, AR, RB1, GPIb beta, MYOD1, WT1, HLA-F, ELK1, APC, BCL2, CALCA, CDH1, CDKN1A, CDKN1B (p27 Kip1), CDKN2a, CDKN2B, CD44, CSPG2, DAPK1, EGFR, EYA4, GSTP1, GTBP/MSH6, HIC-1, HRAS, IGF2, LKB1, MGMT, MLH1, MNCA9, MSH3, MYC, N33, PAX6, PGR, PTEN, RARB, SFN, S100A2, TGFBR2, TIMP3, TP53, TP73, VHL, CDKN1C, CAV1, CDH13, DRG1, PTGS2, THBS1, TPEF (=TMEFF2; =HPP1), DNMT1, CEA, MB, PCNA, CDC2, ESR1, CASP8, RASSF1, MSH4, MSH5. These sequences are derived from the ensembl database (date 01.10.2001) (http://www.ensembl.org) and will be taken to include all minor variations of the sequence material which are currently unforeseen, for example, but not limited to, minor deletions and SNPs.

[0062] SEQ ID 133 to 388 exhibit the pretreated sequences of DNA derived from genes MDR1, APOC2, CACNA1G, EGR4, AR, RB1, GPIb beta, MYOD1, WT1, HLA-F, ELK1, APC, BCL2, CALCA, CDH1, CDKN1A, CDKN1B (p27 Kip1), CDKN2a, CDKN2B, CD44, CSPG2, DAPK1, EGFR, EYA4, GSTP1, GTBP/MSH6, HIC-1, HRAS, IGF2, LKB1, MGMT, MLH1, MNCA9, MSH3, MYC, N33, PAX6, PGR, PTEN, RARB, SFN, S100A2, TGFBR2, TIMP3, TP53, TP73, VHL, CDKN1C, CAV1, CDH13, DRG1, PTGS2, THBS1, TPEF (=TMEFF2; =HPP1), DNMT1, CEA, MB, PCNA, CDC2, ESR1, CASP8, RASSF1, MSH4, MSH5. These sequences will be taken to include all minor variations of the sequence material which are currently unforeseen, for example, but not limited to, minor deletions and SNPs.

[0063] SEQ ID NO: 389 to SEQ ID NO: 518 exhibit the sequences of primer oligonucleotides for the amplification of pretreated DNA according to Sequence ID NO: 133 to SEQ ID NO: 388.

[0064] SEQ ID NO: 65 to SEQ ID NO: 132 exhibit the sequences of oligomers which are useful for the analysis of CpG positions within genomic DNA according to SEQ ID NO: 1 to SEQ ID NO: 64.

[0065] SEQ ID NO: 519 to SEQ ID NO: 1030 exhibit the sequences of oligomers which are useful for the analysis of the methylation status of CpG positions within genomic DNA according to SEQ ID NO: 1 to SEQ ID NO: 64 after treatment of said genomic DNA with bisulfite.

[0066] SEQ ID NO: 895 to SEQ ID NO: 1030 exhibit the sequences of oligomers which are particularly useful for the analysis of CpG positions within genomic DNA according to SEQ ID NO: 1 to SEQ ID NO: 64, after treatment of said with bisulfite and are subject to a preferred embodiment of this invention.

### DESCRIPTION OF FIGURES

[0067] FIG. 1: Differentiation between healthy colon tissue and adenoma or carcinoma colon tissue according to Example 2. The labels on the left side of the plot are gene and CpG identifiers, these can be cross referenced using Table 3 and Table 7. The labels on the right side of the figure give the significance (p-value, T-test) of the difference between the means of the two groups. Each row corresponds to a single CpG and each column to the methylation levels of one sample. CpGs are ordered according to their contribution to the differentiation between the two tissue types (A=healthy, B=non healthy) with increasing contribution from top to bottom. Black indicates total methylation at a given CpG position, white represents no methylation at the particular position, with degrees of methylation represented in grey, from light (low proportion of methylation) to dark (high proportion of methylation).

[0068] FIG. 2: Differentiation between healthy colon tissue and carcinoma colon tissue according to Example 2. The labels on the left side of the plot are gene and CpG identifiers, these can be cross referenced using Table 4 and Table 7. The labels on the right side of the figure give the significance (p-value, T-test) of the difference between the means of the two groups. Each row corresponds to a single CpG and each column to the methylation levels of one sample. CpGs are ordered according to their contribution to the differentiation between the two tissue types (A=healthy, B=carcinoma) with increasing contribution from top to bottom. Black indicates total methylation at a given CpG position, white represents no methylation at the particular position, with degrees of methylation represented in grey, from light (low proportion of methylation) to dark (high proportion of methylation).

[0069] FIG. 3: Differentiation between healthy colon tissue and adenoma colon tissue according to Example 2. The labels on the left side of the plot are gene and CpG identifiers, these can be cross referenced in Table 5 and Table 7. The labels on the right side give the significance (p-value, T-test) of the difference between the means of the two groups. Each row corresponds to a single CpG and each column to the methylation levels of one sample. CpGs are ordered according to their contribution to the distinction to the differential diagnosis between the two tissue types (A=healthy, B=adenoma) with increasing contribution from top to bottom. Black indicates total methylation at a given CpG position, white represents no methylation at the particular position, with degrees of methylation represented in grey, from light (low proportion of methylation) to dark (high proportion of methylation). Due to formatting of the page only 40 CpGs are shown in this figure.

[0070] FIG. 4: Differentiation between carcinoma colon tissue and adenoma colon tissue according to Example 2. The labels on the left side of the plot are gene and CpG identifiers, these can be cross referenced in Table 6 and Table 7. The labels on the right side give the significance (p-value, T-test) of the difference between the means of the two groups. Each row corresponds to a single CpG and each column to the methylation levels of one sample. CpGs are ordered according to their contribution to the distinction to the differential diagnosis between the two tissue types (A=carcinoma, B=adenoma) with increasing contribution from top to bottom. Black indicates total methylation at a given CpG position, white represents no methylation at the particular position, with degrees of methylation represented in grey, from light (low proportion of methylation) to dark (high proportion of methylation).

### EXAMPLES 1 AND 2

### Digital Phenotype

[0071] In the following examples, multiplex PCR was carried out upon tissue samples originating from colon adenomas or colon carcinoma. Multiplex PCR was also carried out upon healthy colon tissue. Each sample was treated in the manner described below in Example 1 in order to deduce the methylation status of CpG positions, the CpG methylation information for each sample was collated and then used in an analysis, as detailed in Example 2. An alternative method for the analysis of CpG methylation status is described in Example 3.

### EXAMPLE 1

[0072] In the first step the genomic DNA was isolated from the cell samples using the Wizzard kit from (Promega).

[0073] The isolated genomic DNA from the samples are treated using a bisulfite solution hydrogen sulfite, disulfite). The treatment is such that all non methylated cytosines within the sample are converted to thiamidine, conversely 5-methylated cytosines within the sample remain unmodified.

[0074] The treated nucleic acids were then amplified using multiplex PCRs, amplifying 8 fragments per reaction with Cy5 fluorescently labelled primers. PCR primers used are described in Table 1. PCR conditions were as follows.

Reaction Solution:

10 ng bisulfite treated DNA

3,5 mM MgCl2

400 μM dNTPs

2 pmol each primer

1 U Hot Star Taq (Qiagen)

[0075] Forty cycles were carried out as follows. Denaturation at 95° C. for 15 min, followed by annealing at 55° C. for 45 sec., primer elongation at 65° C. for 2 min. A final elongation at 65° C. was carried out for 10 min.

[0076] All PCR products from each individual sample were then hybridised to glass slides carrying a pair of immobilised oligonucleotides for each CpG position under analysis. Each of these detection oligonucleotides was designed to hybridise to the bisulphite converted sequence around one CpG site which was either originally unmethylated (TG) or methylated (CG). See Table 2 for further details of all hybridisation oligonucleotides used (both informative and non-informative) Hybridisation conditions were selected to allow the detection of the single nucleotide differences between the TG and CG variants.

[0077] 5 μl volume of each multiplex PCR product was diluted in 10×Ssarc buffer (10×Ssarc:230 ml 20×SSC, 180 ml sodium lauroyl sarcosinate solution 20%, dilute to 1000 ml with dH2O). The reaction mixture was then hybridised to the detection oligonucleotides as follows. Denaturation at 95° C., cooling down to 10° C., hybridisation at 42° C. overnight followed by washing with 10×Ssarc and dH2O at 42° C.

[0078] Fluorescent signals from each hybridised oligonucleotide were detected using genepix scanner and software. Ratios for the two signals (from the CG oligonucleotide and the TG oligonucleotide used to analyse each CpG position) were calculated based on comparison of intensity of the fluorescent signals.

### EXAMPLE 2

[0079] The data obtained according to Example 1 is then sorted into a ranked matrix (as shown in FIGS. 1 to 4) according to CpG methylation differences between the two classes of tissues, using an algorithm. The most significant CpG positions are at the bottom of the matrix with significance decreasing towards the top. Black indicates total methylation at a given CpG position, white represents no methylation at the particular position, with degrees of methylation represented in grey, from light (low proportion of methylation) to dark (high proportion of methylation). Each row represents one specific CpG position within a gene and each column shows the methylation profile for the different CpGs for one sample. On the left side a CpG and gene identifier is shown this may be cross referenced with the accompanying tables (Table 1 and 7) in order to ascertain the gene in question and the detection oligomer used. On the right side p values for the individual CpG positions are shown. The p values are the probabilities that the observed distribution occurred by chance in the data set.

[0080] For selected distinctions, we trained a learning algorithm (support vector machine, SVM). The SVM (as discussed by F. Model, P. Adorjan, A. Olek, C. Piepenbrock, Feature selection for DNA methylation based cancer classification. Bioinformatics. 2001 June;17 Suppl 1:S157-64) constructs an optimal discriminant between two classes of given training samples. In this case each sample is described by the methylation patterns (CG/TG ratios) at the investigated CpG sites. The SVM was trained on a subset of samples of each class, which were presented with the diagnosis attached. Independent test samples, which were not shown to the SVM before were then presented to evaluate, if the diagnosis can be predicted correctly based on the predictor created in the training round. This procedure was repeated several times using different partitions of the samples, a method called cross-validation. Please note that all rounds are performed without using any knowledge obtained in the previous runs. The number of correct classifications was averaged over all runs, which gives a good estimate of our test accuracy (percent of correct classified samples over all rounds).

Healthy Colon Tissue Compared to Non Healthy Colon Tissue (Colon Adenoma and Colon Carcinoma) (FIG. 1)

[0081] FIG. 1 shows the differentiation of healthy tissue from non healthy tissue wherein the non healthy specimens are obtained from either colon adenoma or colon carcinoma tissue. The evaluation is carried out using informative CpG positions from 27 genes. Informative CpG positions are further described in Table 3.

Healthy Colon Tissue Compared to Colon Carcinoma Tissue (FIG. 2)

[0082] FIG. 2 shows the differentiation of healthy tissue from carcinoma tissue using informative CpG positions from 15 genes. Informative CpG positions are further described in Table 4.

Healthy Colon Tissue Compared to Colon Adenoma Tissue (FIG. 3)

[0083] FIG. 3 shows the differentiation of healthy tissue from adenoma tissue using informative CpG positions from 40 genes. Informative CpG positions are further described in Table 5.

Colon Carcinoma Tissue Compared to Colon Adenoma Tissue (FIG. 4)

[0084] FIG. 4 shows the differentiation of carcinoma tissue from adenoma tissue using informative CpG positions from 2 genes. Informative CpG positions are further described in Table 6.

### EXAMPLE 3

### Identification of the Methylation Status of a CpG Site Within the Gene CD44.

[0085] A fragment of the bisulfite treated DNA of the gene CD44 (Seq ID NO: 20) was PCR amplified using primers GAAAGGAGAGGTTAAAGGTTG (Seq ID NO 429) and AACTCACTTAACTCCAATCCC (Seq ID NO 430). The resultant fragment (696 bp in length) contained an informative CpG at position 235. The amplificate DNA was digested with the restriction endonuclease Apa I, recognition site GGGCC. Hydrolysis by said endonuclease is blocked by methylation of the CpG at position 235 of the amplificate. The digest was used as a control.

[0086] Genomic DNA was isolated from sample using the DNA wizzard DNA isolation kit (Promega). Each sample was digested using Apa I according to manufacturer's recommendations (New England Biolabs).

[0087] 10 ng of each genomic digest was then amplified using PCR primers GAAAGGAGAGGTTAAAGGTTG and AACTCACTTAACTCCAATCCC. The PCR reactions were performed using a thermocycler (Eppendorf GmbH) using 10 ng of DNA, 6 pmol of each primer, 200 μM of each dNTP, 1.5 mM MgCl2 and 1 U of HotstartTaq (Qiagen AG). The other conditions were as recommended by the Taq polymerase manufacturer. Using the above mentioned primers, gene fragments were amplified by PCR performing a first denaturation step for 14 min at 96° C., followed by 30-45 cycles (step 2: 60 sec at 96° C., step 3: 45 sec at 52° C., step 4: 75 sec at 72° C.) and a subsequent final elongation of 10 min at 72° C. The presence of PCR products was analysed by agarose gel electrophoresis.

[0088] PCR products were detectable with Apa I hydrolysed DNA isolated wherein the CpG position in question was up-methylated, when step 2 to step 4 of the cycle program were repeated 34, 37, 39, 42 and 45 fold. In contrast PCR products were only detectable with Apa I hydrolysed DNA isolated from down-methylated DNA (and control DNA) when step 2 to step 4 of the cycle program were repeated 42 and 45 fold. These results were incorporated into a CpG methylation matrix analysis as described in Example 2.

[0089] Tables

TABLE 1
PCR primers and products

| | | | |
|---|---|---|---|
| | | | Amplificate |
| No: | Gene: | Primer: | length: |

| | | | |
|---|---|---|---|
| 1 | MDR1 | TAAGTATGTTGAAGAAAGATTATTGTAG | 633 |
| | (SEQ ID NO: 1) | (SEQ ID NO: 389) | |
| | | TAAAAACTATCCCATAATAACTCCCAAC | |
| | | (SEQ ID NO: 390) | |
| 2 | APOC2 | ATGAGTAGAAGAGGTGATAT | 533 |
| | (SEQ ID NO: 2) | (SEQ ID NO: 391) | |
| | | CCCTAAATCCCTTTCTTACC | |
| | | (SEQ ID NO: 392) | |
| 3 | CACNA1G | GGGATTTAAGAGAAATTGAGGTA | 707 |
| | (SEQ ID NO: 3) | (SEQ ID NO: 393) | |
| | | AAACCCCAAACATCCTTTAT | |
| | | (SEQ ID NO: 394) | |
| 4 | EGR4 | AGGGGGATTGAGTGTTAAGT | 293 |
| | (SEQ ID NO: 4) | (SEQ ID NO: 395) | |
| | | CCCAAACATAAACACAAAAT | |
| | | (SEQ ID NO: 396) | |
| 5 | AR | GTAGTAGTAGTAGTAAGAGA | 460 |
| | (SEQ ID NO: 5) | (SEQ ID NO: 397) | |
| | | ACCCCCTAAATAATTATCCT | |
| | | (SEQ ID NO: 398) | |
| 6 | RB1 | TTTAAGTTTGTTTTTGTTTTGGT | 718 |
| | (SEQ ID NO: 6) | (SEQ ID NO: 399) | |
| | | TCCTACTCTAAATCCTCCTCAA | |
| | | (SEQ ID NO: 400) | |
| 7 | GPIb beta | GGTGATAGGAGAATAATGTTGG | 379 |
| | (SEQ ID NO: 7) | (SEQ ID NO: 401) | |
| | | TCTCCCAACTACAACCAAAC | |
| | | (SEQ ID NO: 402) | |
| 8 | MYOD1 | ATTAGGGGTATAGAGGAGTATTGA | 883 |
| | (SEQ ID NO: 8) | (SEQ ID NO: 403) | |
| | | CTTACAAACCCACAATAAACAA | |
| | | (SEQ ID NO: 404) | |
| 9 | WT1 | AAAGGGAAATTAAGTGTTGT | 747 |
| | (SEQ ID NO: 9) | (SEQ ID NO: 405) | |
| | | TAACTACCCTCAACTTCCC | |
| | | (SEQ ID NO: 406) | |
| 10 | HLA-F | TTGTTGTTTTTAGGGGTTTTGG | 946 |
| | (SEQ ID NO: 10) | (SEQ ID NO: 407) | |
| | | TCCTTCCCATTCTCCAAATATC | |
| | | (SEQ ID NO: 408) | |
| 11 | ELK1 | AAGTGTTTTAGTTTTTAATGGGTA | 966 |
| | (SEQ ID NO: 11) | (SEQ ID NO: 409) | |
| | | CAAACCCAAAACTCACCTAT | |
| | | (SEQ ID NO: 410) | |
| 12 | APC | TCAACTACCATCAACTTCCTTA | 491 |
| | (SEQ ID NO: 12) | (SEQ ID NO: 411) | |
| | | AATTTATTTTTAGTGTTGTAGTGGG | |
| | | (SEQ ID NO: 412) | |
| 13 | BCL2 | GTATTTTATGTTAAGGGGGAAA | 640 |
| | (SEQ ID NO: 13) | (SEQ ID NO: 413) | |
| | | AAAAACCACAATCCTCCC | |
| | | (SEQ ID NO: 414) | |
| 14 | CALCA | GTTTTGGAAGTATGAGGGTG | 614 |
| | (SEQ ID NO: 14) | (SEQ ID NO: 415) | |
| | | CCAAATTCTAAACCAATTTCC | |
| | | (SEQ ID NO: 416) | |
| 15 | CDH1 | GAGGTTGGGGTTAGAGGAT | 478 |
| | (SEQ ID NO: 15) | (SEQ ID NO: 417) | |
| | | CAAACTCACAAATACTTTACAATTC | |
| | | (SEQ ID NO: 418) | |
| 16 | CDKN1A | GGATTAGTGGGAATAGAGGTG | 408 |
| | (SEQ ID NO: 16) | (SEQ ID NO: 419) | |
| | | AAACCCAAACTCCTAACTACC | |
| | | (SEQ ID NO: 420) | |
| 17 | CDKN1B | GTGGGGAGGTAGTTGAAGA | 478 |
| | (p27 Kip1) | (SEQ ID NO: 421) | |
| | (SEQ ID NO: 17) | ATACACCCCTAACCCAAAAT | |
| | | (SEQ ID NO: 422) | |
| 18 | CDKN2a | TTGAAAATTAAGGGTTGAGG | 598 |
| | (SEQ ID NO: 18) | (SEQ ID NO: 423) | |
| | | CACCCTCTAATAACCAACCA | |
| | | (SEQ ID NO: 424) | |
| 19 | CDKN2a | GGGGTTGGTTGGTTATTAGA | 256 |
| | (SEQ ID NO: 18) | (SEQ ID NO: 425) | |
| | | AACCCTCTACCCACCTAAAT | |
| | | (SEQ ID NO: 426) | |
| 20 | CDKN2B | GGTTGGTTGAAGGAATAGAAAT | 708 |
| | (SEQ ID NO: 19) | (SEQ ID NO: 427) | |
| | | CCCACTAAACATACCCTTATTC | |
| | | (SEQ ID NO: 428) | |
| 21 | CD44 | GAAAGGAGAGGTTAAAGGTTG | 696 |
| | (SEQ ID NO: 20) | (SEQ ID NO: 429) | |
| | | AACTCACTTAACTCCAATCCC | |
| | | (SEQ ID NO: 430) | |
| 22 | CSPG2 | GGATAGGAGTTGGGATTAAGAT | 414 |
| | (SEQ ID NO: 21) | (SEQ ID NO: 431) | |
| | | AAATCTTTTTCAACACCAAAAT | |
| | | (SEQ ID NO: 432) | |
| 23 | DAPK1 | AACCCTTTCTTCAAATTACAAA | 348 |
| | (SEQ ID NO: 22) | (SEQ ID NO: 433) | |
| | | TGATTGGGTTTTAGGGAAATA | |
| | | (SEQ ID NO: 434) | |
| 24 | EGFR | GGGTTTGGTTGTAATATGGATT | 732 |
| | (SEQ ID NO: 23) | (SEQ ID NO: 435) | |
| | | CCCAACACTACCCCTCTAA | |
| | | (SEQ ID NO: 436) | |
| 25 | EYA4 | GGAAGAGGTGATTAAATGGAT | 226 |
| | (SEQ ID NO: 24) | (SEQ ID NO: 437) | |
| | | CCCAAAAATCAAACAACAA | |
| | | (SEQ ID NO: 438) | |
| 26 | GSTP1 | ATTTGGGAAAGAGGGAAAG | 300 |
| | (SEQ ID NO: 25) | (SEQ ID NO: 439) | |
| | | TAAAAACTCTAAACCCCATCC | |
| | | (SEQ ID NO: 440) | |
| 27 | GTBP/MSH6 | CCCTACCCACCAATATACC | 278 |
| | (SEQ ID NO: 26) | (SEQ ID NO: 441) | |
| | | AGATTGGGGAAGAAGTTGTA | |
| | | (SEQ ID NO: 442) | |
| 28 | HIC-1 | TGGGTTGGAGAAGAAGTTTA | 280 |
| | (SEQ ID NO: 27) | (SEQ ID NO: 443) | |
| | | TCATATTTCCAAAAACACACC | |
| | | (SEQ ID NO: 444) | |
| 29 | HRAS | CTTATTCCCATCTAAACCCTATT | 331 |
| | (SEQ ID NO: 28) | (SEQ ID NO: 445) | |
| | | GTGGTTTTGTGAAGTTTTAGGT | |
| | | (SEQ ID NO: 446) | |
| 30 | IGF2 | CCCTTCCCCTTAACTAAACT | 364 |
| | (SEQ ID NO: 29) | (SEQ ID NO: 447) | |
| | | AATTTGGGTTAGGTTTGGA | |
| | | (SEQ ID NO: 448) | |
| 31 | LKB1 | TAAAAGAAGGATTTTTGATTGG | 528 |
| | (SEQ ID NO: 30) | (SEQ ID NO: 449) | |
| | | CATCTTATTTACCTCCCTCCC | |
| | | (SEQ ID NO: 450) | |
| 32 | MGMT | AAGGTTTTAGGGAAGAGTGTTT | 636 |
| | (SEQ ID NO: 31) | (SEQ ID NO: 451) | |
| | | ACCTTTTCCTATCACAAAAATAA | |
| | | (SEQ ID NO: 452) | |
| 33 | MLH1 | TAAGGGGAGAGGAGGAGTTT | 545 |
| | (SEQ ID NO: 32) | (SEQ ID NO: 453) | |
| | | ACCAATTCTCAATCATCTCTTT | |
| | | (SEQ ID NO: 454) | |
| 34 | MNCA9 | GGGAAGTAGGTTAGGGTTAGTT | 616 |
| | (SEQ ID NO: 33) | (SEQ ID NO: 455) | |
| | | AAATCCTCCTCTCCAAATAAAT | |
| | | (SEQ ID NO: 456) | |
| 35 | MSH3 | TGTTTGGGATTGGGTAGG | 211 |
| | (SEQ ID NO: 34) | (SEQ ID NO: 457) | |
| | | CATAACCTTTACCTATCTCCTCA | |
| | | (SEQ ID NO: 458) | |
| 36 | MYC | AGAGGGAGTAAAAGAAAATGGT | 712 |
| | (SEQ ID NO: 35) | (SEQ ID NO: 459) | |
| | | CCAAATAAACAAAATAACCTCC | |
| | | (SEQ ID NO: 460) | |
| 37 | N33 | TTTTAGATTGAGGTTTTAGGGT | 497 |
| | (SEQ ID NO: 36) | (SEQ ID NO: 461) | |
| | | ATCCATTCTACCTCCTTTTTCT | |
| | | (SEQ ID NO: 462) | |
| 38 | PAX6 | GGAGGGGAGAGGGTTATG | 374 |
| | (SEQ ID NO: 37) | (SEQ ID NO: 463) | |
| | | TACTATACACACCCCAAAACAA | |
| | | (SEQ ID NO: 464) | |
| 39 | PGR | TTTTGGGAATGGGTTGTAT | 369 |
| | (SEQ ID NO: 38) | (SEQ ID NO: 465) | |
| | | CTACCCTTAACCTCCATCCTA | |
| | | (SEQ ID NO: 466) | |
| 40 | PTEN | TTTTAGGTAGTTATATTGGGTATGTT | 346 |
| | (SEQ ID NO: 39) | (SEQ ID NO: 467) | |
| | | TCAACTCTCAAACTTCCATCA | |
| | | (SEQ ID NO: 468) | |
| 41 | RARB | TTGTTGGGAGTTTTTAAGTTTT | 353 |
| | (SEQ ID NO: 40) | (SEQ ID NO: 469) | |
| | | CAAATTCTCCTTCCAAATAAAT | |
| | | (SEQ ID NO: 470) | |
| 42 | SFN | GAAGAGAGGAGAGGGAGGTA | 489 |
| | (SEQ ID NO: 41) | (SEQ ID NO: 471) | |
| | | CTATCCAACAAACCCAACA | |
| | | (SEQ ID NO: 472) | |
| 43 | S100A2 | GTTTTTAAGTTGGAGAAGAGGA | 460 |
| | (SEQ ID NO: 42) | (SEQ ID NO: 473) | |
| | | ACCTATAAATCACAACCCACTC | |
| | | (SEQ ID NO: 474) | |
| 44 | TGFBR2 | GTAATTTGAAGAAAGTTGAGGG | 296 |
| | (SEQ ID NO: 43) | (SEQ ID NO: 475) | |
| | | CCAACAACTAAACAAAACCTCT | |
| | | (SEQ ID NO: 476) | |
| 45 | TIMP3 | TGAGAAAATTGTTGTTTGAAGT | 306 |
| | (SEQ ID NO: 44) | (SEQ ID NO: 477) | |
| | | CAAAATACCCTAAAAACCACTC | |
| | | (SEQ ID NO: 478) | |
| 46 | TP53 | GGAGTTGTATTGTTGGGAGA | 279 |
| | (SEQ ID NO: 45) | (SEQ ID NO: 479) | |
| | | TAAAACCCCAATTTTCACTAA | |
| | | (SEQ ID NO: 480) | |
| 47 | TP73 | AGTAAATAGTGGGTGAGTTATGAA | 607 |
| | (SEQ ID NO: 46) | (SEQ ID NO: 481) | |
| | | GAAAAACCTCTAAAAACTACTCTCC | |
| | | (SEQ ID NO: 482) | |
| 48 | VHL | TGTAAAATGAATAAAGTTAATGAGTG | 362 |
| | (SEQ ID NO: 47) | (SEQ ID NO: 483) | |
| | | TCCTAAATTCAAATAATCCTCCT | |
| | | (SEQ ID NO: 484) | |
| 49 | CDKN1C | GGGGAGGTAGATATTTGGATAA | 300 |
| | (SEQ ID NO: 48) | (SEQ ID NO: 485) | |
| | | AACTACACCATTTATATTCCCAC | |
| | | (SEQ ID NO: 486) | |
| 50 | CAV1 | GTTAGTATGTTTGGGGGTAAAT | 435 |
| | (SEQ ID NO: 49) | (SEQ ID NO: 487) | |
| | | ATAAATAACACCTTCCACCCTA | |
| | | (SEQ ID NO: 488) | |
| 51 | CDH13 | TTTGTATTAGGTTGGAAGTGGT | 286 |
| | (SEQ ID NO: 50) | (SEQ ID NO: 489) | |
| | | CCCAAATAAATCAACAACAACA | |
| | | (SEQ ID NO: 490) | |
| 52 | DRG1 | GGTTTTGGGTTTAGTGGTAAAT | 416 |
| | (SEQ ID NO: 51) | (SEQ ID NO: 491) | |
| | | AACTTTCATAACTCACCCTTTC | |
| | | (SEQ ID NO: 492) | |
| 53 | PTGS2 | GATTTTTGGAGAGGAAGTTAAG | 381 |
| | (SEQ ID NO: 52) | (SEQ ID NO: 493) | |
| | | AAAACTAAAAACCAAACCCATA | |
| | | (SEQ ID NO: 494) | |
| 54 | THBS1 | TGGGGTTAGTTTAGGATAGG | 398 |
| | (SEQ ID NO: 53) | (SEQ ID NO: 495) | |
| | | CTTAAAAACACTAAAACTTCTCAAA | |
| | | (SEQ ID NO: 496) | |
| 55 | TPEF | TTGTTTGGGTTAATAAATGGA | 295 |
| | =TEMFF2; =HPP1) | (SEQ ID NO: 497) | |
| | (SEQ ID NO: 54) | CTTCTCTCTTCTCCCCTCTC | |
| | | (SEQ ID NO: 498) | |
| 56 | DNMT1 | TCCCCATCACACCTAAAA | 210 |
| | (SEQ ID NO: 55) | (SEQ ID NO: 499) | |
| | | GGGAGGAGGGGATGTATT | |
| | | (SEQ ID NO: 500) | |
| 57 | CEA | TATGGGAGGAGGTTAGTAAGTG | 680 |
| | (SEQ ID NO: 56) | (SEQ ID NO: 501) | |
| | | CCCCAAATCCTACATATAAAAA | |
| | | (SEQ ID NO: 502) | |
| 58 | MB | GTTTTTGGTAAAGGGGTAGAA | 598 |
| | (SEQ ID NO: 57) | (SEQ ID NO: 503) | |
| | | CCTAAAATATCAACCTCCACCT | |
| | | (SEQ ID NO: 504) | |
| 59 | PCNA | TTTTTAGGTTGTAAGGAGGTTTT | 608 |
| | (SEQ ID NO: 58) | (SEQ ID NO: 505) | |
| | | TAAATACCTCCAACACCTTTCT | |
| | | (SEQ ID NO: 506) | |
| 60 | CDC2 | ATTAGAAGTGAAAGTAATGGAATTT | 418 |
| | (SEQ ID NO: 59) | (SEQ ID NO: 507) | |
| | | TCAATTTCCAAAAACCAAC | |
| | | (SEQ ID NO: 508) | |
| 61 | ESR1 | AGGGGGAATTAAATAGAAAGAG | 662 |
| | (SEQ ID NO: 60) | (SEQ ID NO: 509) | |
| | | CAATAAAACCATCCCAAATACT | |
| | | (SEQ ID NO: 510) | |
| 62 | CASP8 | AGTGGATTTGGAGTTTAGATGT | 431 |
| | (SEQ ID NO: 61) | (SEQ ID NO: 511) | |
| | | AACAAAATAAAAACTTCTCCCA | |
| | | (SEQ ID NO: 512) | |
| 63 | RASSF1 | ACCTCTCTACAAATTACAAATTCA | 347 |
| | (SEQ ID NO: 62) | (SEQ ID NO: 513) | |
| | | AGTTTGGGTTAGTTTGGGTT | |
| | | (SEQ ID NO: 514) | |
| 64 | MSH4 | AGGATGTTGAGGTTTGAGATT | 339 |
| | (SEQ ID NO: 63) | (SEQ ID NO: 515) | |
| | | CACTATAATAACCACCACCCA | |
| | | (SEQ ID NO: 516) | |
| 65 | MSH5 | TATTAGGAATAAAGTTGGGGAG | 395 |
| | (SEQ ID NO: 64) | (SEQ ID NO: 517) | |
| | | AACCCTTCAAACAAAAATAAAA | |
| | | (SEQ ID NO: 518) | |

[0090] TABLE 2
Hybridisation oligonucleotides

| | | |
|---|---|---|
| No: | Gene | Oligo: |

| | | |
|---|---|---|
| 1 | MDR1 | TTGGTGGTCGTTTTAAGG |
| | (SEQ ID NO: 1) | (SEQ ID NO: 519) |
| 2 | MDR1 | TTGGTGGTTGTTTTAAGG |
| | (SEQ ID NO: 1) | (SEQ ID NO: 520) |
| 3 | MDR1 | TTGAAAGACGTGTTTATA |
| | (SEQ ID NO: 1) | (SEQ ID NO: 521) |
| 4 | MDR1 | TTGAAAGATGTGTTTATA |
| | (SEQ ID NO: 1) | (SEQ ID NO: 522) |
| 5 | MDR1 | AGGTGTAACGGAAGTTAG |
| | (SEQ ID NO: 1) | (SEQ ID NO: 523) |
| 6 | MDR1 | AGGTGTAATGGAAGTTAG |
| | (SEQ ID NO: 1) | (SEQ ID NO: 524) |
| 7 | MDR1 | TAGTTTTTCGAGGAATTA |
| | (SEQ ID NO: 1) | (SEQ ID NO: 525) |
| 8 | MDR1 | TAGTTTTTTGAGGAATTA |
| | (SEQ ID NO: 1) | (SEQ ID NO: 526) |
| 9 | APOC2 | GAGAGTTTCGTTTTTGTT |
| | (SEQ ID NO: 2) | (SEQ ID NO: 527) |
| 10 | APOC2 | GAGAGTTTTGTTTTTGTT |
| | (SEQ ID NO: 2) | (SEQ ID NO: 528) |
| 11 | APOC2 | TTGGGGGACGTTATTGTT |
| | (SEQ ID NO: 2) | (SEQ ID NO: 529) |
| 12 | APOC2 | TTGGGGGATGTTATTGTT |
| | (SEQ ID NO: 2) | (SEQ ID NO: 530) |
| 13 | APOC2 | TGTGTTCGTTCGGAGTTG |
| | (SEQ ID NO: 2) | (SEQ ID NO: 531) |
| 14 | APOC2 | TGTGTTTGTTTGGAGTTG |
| | (SEQ ID NO: 2) | (SEQ ID NO: 532) |
| 15 | APOC2 | TGGGTTTGCGGAGAATGG |
| | (SEQ ID NO: 2) | (SEQ ID NO: 533) |
| 16 | APOC2 | TGGGTTTGTGGAGAATGG |
| | (SEQ ID NO: 2) | (SEQ ID NO: 534) |
| 17 | CACNA1G | TTTAGGAGCGTTAATGTG |
| | (SEQ ID NO: 3) | (SEQ ID NO: 535) |
| 18 | CACNA1G | TTTAGGAGTGTTAATGTG |
| | (SEQ ID NO: 3) | (SEQ ID NO: 536) |
| 19 | CACNA1G | TAGGGTTACGAGGTTAGG |
| | (SEQ ID NO: 3) | (SEQ ID NO: 537) |
| 20 | CACNA1G | TAGGGTTATGAGGTTAGG |
| | (SEQ ID NO: 3) | (SEQ ID NO: 538) |
| 21 | CACNA1G | GGAGGTTACGTTTAGATT |
| | (SEQ ID NO: 3) | (SEQ ID NO: 539) |
| 22 | CACNA1G | GGAGGTTATGTTTAGATT |
| | (SEQ ID NO: 3) | (SEQ ID NO: 540) |
| 23 | CAGNA1G | TTAGGGGTCGTGGATAAA |
| | (SEQ ID NO: 3) | (SEQ ID NO: 541) |
| 24 | CACNA1G | TTAGGGGTTGTGGATAAA |
| | (SEQ ID NO: 3) | (SEQ ID NO: 542) |
| 25 | EGR4 | GGTGGGAAGCGTATTTAT |
| | (SEQ ID NO: 4) | (SEQ ID NO: 543) |
| 26 | EGR4 | GGTGGGAAGTGTATTTAT |
| | (SEQ ID NO: 4) | (SEQ ID NO: 544) |
| 27 | EGR4 | TTATAGTTCGAGTTTTTT |
| | (SEQ ID NO: 4) | (SEQ ID NO: 545) |
| 28 | EGR4 | TTATAGTTTGAGTTTTTT |
| | (SEQ ID NO: 4) | (SEQ ID NO: 546) |
| 29 | EGR4 | GGAGTTTTCGGTATATAT |
| | (SEQ ID NO: 4) | (SEQ ID NO: 927) |
| 30 | EGR4 | GGAGTTTTTGGTATATAT |
| | (SEQ ID NO: 4) | (SEQ ID NO: 928) |
| 31 | AR | TGTTATTTCGAGAGAGGT |
| | (SEQ ID NO: 5) | (SEQ ID NO: 547) |
| 32 | AR | TGTTATTTTGAGAGAGGT |
| | (SEQ ID NO: 5) | (SEQ ID NO: 548) |
| 33 | AR | AGAGGTTGCGTTTTAGAG |
| | (SEQ ID NO: 5) | (SEQ ID NO: 1027) |
| 34 | AR | AGAGGTTGTGTTTTAGAG |
| | (SEQ ID NO: 5) | (SEQ ID NO: 1028) |
| 35 | AR | ATTTTGAGCGAGGTTAGT |
| | (SEQ ID NO: 5) | (SEQ ID NO: 549) |
| 36 | AR | ATTTTGAGTGAGGTTAGT |
| | (SEQ ID NO: 5) | (SEQ ID NO: 550) |
| 37 | AR | GTAGTATTCGAAGGTAGT |
| | (SEQ ID NO: 5) | (SEQ ID NO: 551) |
| 38 | AR | GTAGTATTTGAAGGTAGT |
| | (SEQ ID NO: 5) | (SEQ ID NO: 552) |
| 39 | RB1 | TTAGATTTCGGGATAGGG |
| | (SEQ ID NO: 6) | (SEQ ID NO: 553) |
| 40 | RB1 | TTAGATTTTGGGATAGGG |
| | (SEQ ID NO: 6) | (SEQ ID NO: 554) |
| 41 | RB1 | TATAGTTTCGTTAAGTGT |
| | (SEQ ID NO: 6) | (SEQ ID NO: 555) |
| 42 | RB1 | TATAGTTTTGTTAAGTGT |
| | (SEQ ID NO: 6) | (SEQ ID NO: 556) |
| 43 | RB1 | GTGTATTTCGGTTTGGAG |
| | (SEQ ID NO: 6) | (SEQ ID NO: 557) |
| 44 | RB1 | GTGTATTTTGGTTTGGAG |
| | (SEQ ID NO: 6) | (SEQ ID NO: 558) |
| 45 | RB1 | TGGATTTACGTTAGGTTT |
| | (SEQ ID NO: 6) | (SEQ ID NO: 559) |
| 46 | RB1 | TGGATTTATGTTAGGTTT |
| | (SEQ ID NO: 6) | (SEQ ID NO: 560) |
| 47 | GPIb beta | TGTTATTTGTCGTTGTAG |
| | (SEQ ID NO: 7) | (SEQ ID NO: 561) |
| 48 | GPIb beta | TGTTATTTGTTGTTGTAG |
| | (SEQ ID NO: 7) | (SEQ ID NO: 562) |
| 49 | GPIb beta | GTGGGAGCGGAAGTTTGA |
| | (SEQ ID NO: 7) | (SEQ ID NO: 563) |
| 50 | GPIb beta | GTGGGAGTGGAAGTTTGA |
| | (SEQ ID NO: 7) | (SEQ ID NO: 564) |
| 51 | GPIb beta | TAGAGTAAGTCGGGTTGT |
| | (SEQ ID NO: 7) | (SEQ ID NO: 565) |
| 52 | GPIb beta | TAGAGTAAGTCGGGTTGTT |
| | (SEQ ID NO: 7) | (SEQ ID NO: 566) |
| 53 | GPIb beta | GGTTAGGTCGTAGTATTG |
| | (SEQ ID NO: 7) | (SEQ ID NO: 567) |
| 54 | GPIb beta | GGTTAGGTTGTAGTATTG |
| | (SEQ ID NO: 7) | (SEQ ID NO: 568) |
| 55 | GPIb beta | GGAGTTCGGTCGGGTTTT |
| | (SEQ ID NO: 7) | (SEQ ID NO: 1005) |
| 56 | GPIb beta | GGAGTTTGGTTGGGTTTT |
| | (SEQ ID NO: 7) | (SEQ ID NO: 1006) |
| 57 | MYOD1 | ATAGTAGTCGGGTGTTGG |
| | (SEQ ID NO: 8) | (SEQ ID NO: 569) |
| 58 | MYOD1 | ATAGTAGTTGGGTGTTGG |
| | (SEQ ID NO: 8) | (SEQ ID NO: 570) |
| 59 | MYOD1 | GTGTTAGTCGTTTAGGGT |
| | (SEQ ID NO: 8) | (SEQ ID NO: 1009) |
| 60 | MYOD1 | GTGTTAGTTGTTTAGGGT |
| | (SEQ ID NO: 8) | (SEQ ID NO: 1010) |
| 61 | MYOD1 | TAGTTGTTCGTTTGGGTT |
| | (SEQ ID NO: 8) | (SEQ ID NO: 571) |
| 62 | MYOD1 | TAGTTGTTTGTTTGGGTT |
| | (SEQ ID NO: 8) | (SEQ ID NO: 572) |
| 63 | MYOD1 | AATTAGGTCGGATAGGAG |
| | (SEQ ID NO: 8) | (SEQ ID NO: 975) |
| 64 | MYOD1 | AATTAGGTTGGATAGGAG |
| | (SEQ ID NO: 8) | (SEQ ID NO: 976) |
| 65 | WT1 | TAGTGAGACGAGGTTTTT |
| | (SEQ ID NO: 9) | (SEQ ID NO: 1017) |
| 66 | WT1 | TAGTGAGATGAGGTTTTT |
| | (SEQ ID NO: 9) | (SEQ ID NO. 1018) |
| 67 | WT1 | TATATTGGCGAAGGTTAA |
| | (SEQ ID NO: 9) | (SEQ ID NO: 967) |
| 68 | WT1 | TATATTGGTGAAGGTTAA |
| | (SEQ ID NO: 9) | (SEQ ID NO: 968) |
| 69 | WT1 | TGTTATATCGGTTAGTTG |
| | (SEQ ID NO: 9) | (SEQ ID NO: 959) |
| 70 | WT1 | TGTTATATTGGTTAGTTG |
| | (SEQ ID NO: 9) | (SEQ ID NO: 960) |
| 71 | WT1 | TTTAGTTTCGATTTTTGG |
| | (SEQ ID NO: 9) | (SEQ ID NO: 573) |
| 72 | WT1 | TTTAGTTTTGATTTTTGG |
| | (SEQ ID NO: 9) | (SEQ ID NO: 574) |
| 73 | HLA-F | ATAGGGTACGTTAAGGTT |
| | (SEQ ID NO: 10) | (SEQ ID NO: 575) |
| 74 | HLA-F | ATAGGGTATGTTAAGGTT |
| | (SEQ ID NO: 10) | (SEQ ID NO: 576) |
| 75 | HLA-F | TATTTGGGCGGGTGAGTG |
| | (SEQ ID NO: 10) | (SEQ ID NO: 939) |
| 76 | HLA-F | TATTTGGGTGGGTGAGTG |
| | (SEQ ID NO: 10) | (SEQ ID NO: 940) |
| 77 | HLA-F | GAGAGAAACGGTTTTTGT |
| | (SEQ ID NO: 10) | (SEQ ID NO: 577) |
| 78 | HLA-F | GAGAGAAATGGTTTTTGT |
| | (SEQ ID NO: 10) | (SEQ ID NO: 578) |
| 79 | HLA-F | AGTTGTTTCGTAGATATT |
| | (SEQ ID NO: 10) | (SEQ ID NO: 989) |
| 80 | HLA-F | AGTTGTTTTGTAGATATT |
| | (SEQ ID NO: 10) | (SEQ ID NO: 990) |
| 81 | ELK1 | TGTTTAATCGTAGAGTTG |
| | (SEQ ID NO: 11) | (SEQ ID NO: 579) |
| 82 | ELK1 | TGTTTAATTGTAGAGTTG |
| | (SEQ ID NO: 11) | (SEQ ID NO: 580) |
| 83 | ELK1 | TTTGTTTTCGTTGAGTAG |
| | (SEQ ID NO: 11) | (SEQ ID NO: 581) |
| 84 | ELK1 | TTTGTTTTTGTTGAGTAG |
| | (SEQ ID NO: 11) | (SEQ ID NO: 582) |
| 85 | ELK1 | GAAGGGTTCGTTTTTTAA |
| | (SEQ ID NO: 11) | (SEQ ID NO: 583) |
| 86 | ELK1 | GAAGGGTTTGTTTTTTAA |
| | (SEQ ID NO: 11) | (SEQ ID NO: 584) |
| 87 | ELK1 | ATTAATAGCGTTTTGGTT |
| | (SEQ ID NO: 11) | (SEQ ID NO: 585) |
| 88 | ELK1 | ATTAATAGTGTTTTGGTT |
| | (SEQ ID NO: 11) | (SEQ ID NO: 586) |
| 89 | APC | TTTAATCGTATAGTTTGT |
| | (SEQ ID NO: 12) | (SEQ ID NO: 971) |
| 90 | APC | TTTAATTGTATAGTTTGT |
| | (SEQ ID NO: 12) | (SEQ ID NO: 972) |
| 91 | APC | TATTTAGCGGATTATATA |
| | (SEQ ID NO: 12) | (SEQ ID NO. 587) |
| 92 | APC | TATTTAGTGGATTATATA |
| | (SEQ ID NO: 12) | (SEQ ID NO: 588) |
| 93 | APC | TATTTTGGCGGGTTGTAT |
| | (SEQ ID NO: 12) | (SEQ ID NO: 985) |
| 94 | APC | TATTTTGGTGGGTTGTAT |
| | (SEQ ID NO: 12) | (SEQ ID NO: 986) |
| 95 | APC | AAGGTTATCGGTTTAAGA |
| | (SEQ ID NO: 12) | (SEQ ID NO: 589) |
| 96 | APC | AAGGTTATTGGTTTAAGA |
| | (SEQ ID NO: 12) | (SEQ ID NO: 590) |
| 97 | APC | GGGGGACGACGTTTTTGT |
| | (SEQ ID NO: 12) | (SEQ ID NO: 591) |
| 98 | APC | GGGGGATGATGTTTTTGT |
| | (SEQ ID NO: 12) | (SEQ ID NO: 592) |
| 99 | BCL2 | AGTGTTTCGCGTGATTGA |
| | (SEQ ID NO: 13) | (SEQ ID NO: 593) |
| 100 | BCL2 | AGTGTTTCGCGTGATTGA |
| | (SEQ ID NO: 13) | (SEQ ID NO: 594) |
| 101 | BCL2 | TAAGTTGTCGTAGAGGGG |
| | (SEQ ID NO: 13) | (SEQ ID NO: 595) |
| 102 | BCL2 | TAAGTTGTTGTAGAGGGG |
| | (SEQ ID NO: 13) | (SEQ ID NO: 596) |
| 103 | BCL2 | GGATTTCGTCGTTGTAGA |
| | (SEQ ID NO: 13) | (SEQ ID NO: 597) |
| 104 | BCL2 | GGATTTTGTTGTTGTAGA |
| | (SEQ ID NO: 13) | (SEQ ID NO: 598) |
| 105 | BCL2 | TTTTGTTACGGTGGTGGA |
| | (SEQ ID NO: 13) | (SEQ ID NO: 1025) |
| 106 | BCL2 | TTTTGTTATGGTGGTGGA |
| | (SEQ ID NO: 13) | (SEQ ID NO: 1026) |
| 107 | CALCA | GAGGGTGACGTAATTTAG |
| | (SEQ ID NO: 14) | (SEQ ID NO: 599) |
| 108 | CALCA | GAGGGTGATGTAATTTAG |
| | (SEQ ID NO: 14) | (SEQ ID NO: 600) |
| 109 | CALCA | TGTATTGGCGGAATTTTT |
| | (SEQ ID NO: 14) | (SEQ ID NO: 601) |
| 110 | CALCA | TGTATTGGTGGAATTTTT |
| | (SEQ ID NO: 14) | (SEQ ID NO: 602) |
| 111 | CALCA | ATTAGGTTCGTGTTTTAG |
| | (SEQ ID NO: 14) | (SEQ ID NO: 953) |
| 112 | CALCA | ATTAGGTTTGTGTTTTAG |
| | (SEQ ID NO: 14) | (SEQ ID NO: 954) |
| 113 | CALCA | GTTAGTTTCGGGATATTT |
| | (SEQ ID NO: 14) | (SEQ ID NO: 603) |
| 114 | CALCA | GTTAGTTTTGGGATATTT |
| | (SEQ ID NO: 14) | (SEQ ID NO: 604) |
| 115 | CDH1 | TAGAGGATCGTTTGAGTT |
| | (SEQ ID NO: 15) | (SEQ ID NO: 605) |
| 116 | CDH1 | TAGAGGATTGTTTGAGTT |
| | (SEQ ID NO: 15) | (SEQ ID NO: 606) |
| 117 | CDH1 | GTTGTGATCGTATTATTG |
| | (SEQ ID NO: 15) | (SEQ ID NO: 607) |
| 118 | CDH1 | GTTGTGATTGTATTATTG |
| | (SEQ ID NO: 15) | (SEQ ID NO: 608) |
| 119 | CDH1 | TTGGGATTCGAATTTAGT |
| | (SEQ ID NO: 15) | (SEQ ID NO: 609) |
| 120 | CDH1 | TTGGGATTTGAATTTAGT |
| | (SEQ ID NO: 15) | (SEQ ID NO: 610) |
| 121 | CDH1 | AGGGTTATCGCGTTTATG |
| | (SEQ ID NO: 15) | (SEQ ID NO: 983) |
| 122 | CDH1 | AGGGTTATTGTGTTTATG |
| | (SEQ ID NO: 15) | (SEQ ID NO: 984) |
| 123 | CDH1 | TAGTGGCGTCGGAATTGT |
| | (SEQ ID NO: 15) | (SEQ ID NO: 929) |
| 124 | CDH1 | TAGTGGTGTTGGAATTGT |
| | (SEQ ID NO: 15) | (SEQ ID NO: 930) |
| 125 | CDKN1A | AGGTGTATCGTTTTTATA |
| | (SEQ ID NO: 16) | (SEQ ID NO: 611) |
| 126 | CDKN1A | AGGTGTATTGTTTTTATA |
| | (SEQ ID NO: 16) | (SEQ ID NO: 612) |
| 127 | CDKN1A | TGGGTTAGCGGTGAGTTA |
| | (SEQ ID NO: 16) | (SEQ ID NO: 613) |
| 128 | CDKN1A | TGGGTTAGTGGTGAGTTA |
| | (SEQ ID NO: 16) | (SEQ ID NO: 614) |
| 129 | CDKN1A | GTTTATTTCGTGGGGAAA |
| | (SEQ ID NO: 16) | (SEQ ID NO: 615) |
| 130 | CDKN1A | GTTTATTTTGTGGGGAAA |
| | (SEQ ID NO: 16) | (SEQ ID NO: 616) |
| 131 | CDKN1A | TTGGAATTCGGTTAGGTT |
| | (SEQ ID NO: 16) | (SEQ ID NO: 617) |
| 132 | CDKN1A | TTGGAATTTGGTTAGGTT |
| | (SEQ ID NO: 16) | (SEQ ID NO: 618) |
| 133 | CDKN1B (p27 | AAGAGAAACGTTGGAATA |
| | Kip1) | (SEQ ID NO: 619) |
| | (SEQ ID NO: 17) | |
| 134 | CDKN1B (p27 | AAGAGAAATGTTGGAATA |
| | Kip1) | (SEQ ID NO: 620) |
| | (SEQ ID NO: 17) | |
| 135 | CDKN1B (p27 | TTTGATTTCGAGGGGAGT |
| | Kip1) | (SEQ ID NO: 621) |
| | (SEQ ID NO: 17) | |
| 136 | CDKN1B (p27 | TTTGATTTTGAGGGGAGT |
| | Kip1) | (SEQ ID NO: 622) |
| | (SEQ ID NO: 17) | |
| 137 | CDKN1B (p27 | GTATTTGGCGGTTGGATT |
| | Kip1) | (SEQ ID NO: 623) |
| | (SEQ ID NO: 17) | |
| 138 | CDKN1B (p27 | GTATTTGGTGGTTGGATT |
| | Kip1) | (SEQ ID NO: 624) |
| | (SEQ ID NO: 17) | |
| 139 | CDKN1B (p27 | TATAATTTCGGGAAAGAA |
| | Kip1) | (SEQ ID NO: 625) |
| | (SEQ ID NO: 17) | |
| 140 | CDKN1B (p27 | TATAATTTTGGGAAAGAA |
| | Kip1) | (SEQ ID NO: 626) |
| | (SEQ ID NO: 17) | |
| 141 | CDKN2a | AGAGTGAACGTATTTAAA |
| | (SEQ ID NO: 18) | (SEQ ID NO: 627) |
| 142 | CDKN2a | AGAGTGAATGTATTTAAA |
| | (SEQ ID NO: 18) | (SEQ ID NO: 628) |
| 143 | CDKN2a | GTTGTTTTCGGTTGGTGT |
| | (SEQ ID NO: 18) | (SEQ ID NO: 1029) |
| 144 | CDKN2a | GTTGTTTTTGGTTGGTGT |
| | (SEQ ID NO: 18) | (SEQ ID NO: 1030) |
| 145 | CDKN2a | GATAGGGTCGGAGGGGGT |
| | (SEQ ID NO: 18) | (SEQ ID NO: 629) |
| 146 | CDKN2a | GATAGGGTTGGAGGGGGT |
| | (SEQ ID NO: 18) | (SEQ ID NO: 630) |
| 147 | CDKN2a | GGAGTTTTCGGTTGATTG |
| | (SEQ ID NO: 18) | (SEQ ID NO: 997) |
| 148 | CDKN2a | GGAGTTTTTGGTTGATTG |
| | (SEQ ID NO: 18) | (SEQ ID NO: 998) |
| 149 | CDKN2a | AATAGTTACGGTCGGAGG |
| | (SEQ ID NO: 18) | (SEQ ID NO: 981) |
| 150 | CDKN2a | AATAGTTATGGTTGGAGG |
| | (SEQ ID NO: 18) | (SEQ ID NO: 982) |
| 151 | CDKN2B | ATATTTAGCGAGTAGTGT |
| | (SEQ ID NO: 19) | (SEQ ID NO: 631) |
| 152 | CDKN2B | ATAGGGGGCGGAGTTTAA |
| | (SEQ ID NO: 19) | (SEQ ID NO: 632) |
| 153 | CDKN2B | ATAGGGGGCGGAGTTTAA |
| | (SEQ ID NO: 19) | (SEQ ID NO: 633) |
| 154 | CDKN2B | ATAGGGGGTGGAGTTTAA |
| | (SEQ ID NO: 19) | (SEQ ID NO: 634) |
| 155 | CDKN2B | TTATTGTACGGGGTTTTA |
| | (SEQ ID NO: 19) | (SEQ ID NO: 635) |
| 156 | CDKN2B | TTATTGTATGGGGTTTTA |
| | (SEQ ID NO: 19) | (SEQ ID NO: 636) |
| 157 | CDKN2B | TTTTAAGTCGTAGAAGGA |
| | (SEQ ID NO: 19) | (SEQ ID NO: 637) |
| 158 | CDKN2B | TTTTAAGTTGTAGAAGGA |
| | (SEQ ID NO: 19) | (SEQ ID NO: 638) |
| 159 | CD44 | GTGGGGTTCGGAGGTATA |
| | (SEQ ID NO: 20) | (SEQ ID NO: 919) |
| 160 | CD44 | GTGGGGTTTGGAGGTATA |
| | (SEQ ID NO: 20) | (SEQ ID NO: 920) |
| 161 | CD44 | GGTAGTTTCGATTATTTA |
| | (SEQ ID NO: 20) | (SEQ ID NO: 639) |
| 162 | CD44 | GGTAGTTTTGATTATTTA |
| | (SEQ ID NO: 20) | (SEQ ID NO: 640) |
| 163 | CD44 | TTGTTTAGCGGATTTTAG |
| | (SEQ ID NO: 20) | (SEQ ID NO: 897) |
| 164 | CD44 | TTGTTTAGTGGATTTTAG |
| | (SEQ ID NO: 20) | (SEQ ID NO: 898) |
| 165 | CD44 | TGGTGGTACGTAGTTTGG |
| | (SEQ ID NO: 20) | (SEQ ID NO: 641) |
| 166 | CD44 | TGGTGGTATGTAGTTTGG |
| | (SEQ ID NO: 20) | (SEQ ID NO: 642) |
| 167 | CSPG2 | AAGATTTTCGGTTAGTTT |
| | (SEQ ID NO: 21) | (SEQ ID NO: 963) |
| 168 | CSPG2 | AAGATTTTTGGTTAGTTT |
| | (SEQ ID NO: 21) | (SEQ ID NO: 964) |
| 169 | CSPG2 | ATGTGATTCGTTTGGGTA |
| | (SEQ ID NO: 21) | (SEQ ID NO: 643) |
| 170 | CSPG2 | ATGTGATTTGTTTGGGTA |
| | (SEQ ID NO: 21) | (SEQ ID NO: 644) |
| 171 | CSPG2 | GGGTAACGTCGAATTTAG |
| | (SEQ ID NO: 21) | (SEQ ID NO: 901) |
| 172 | CSPG2 | GGGTAATGTTGAATTTAG |
| | (SEQ ID NO: 21) | (SEQ ID NO: 902) |
| 173 | CSPG2 | AAAAATTCGCGAGTTTAG |
| | (SEQ ID NO: 21) | (SEQ ID NO: 945) |
| 174 | CSPG2 | AAAAATTTGTGAGTTTAG |
| | (SEQ ID NO: 21) | (SEQ ID NO: 946) |
| 175 | DAPK1 | GTTGGAGTCGAGGTTTGA |
| | (SEQ ID NO: 22) | (SEQ ID NO: 645) |
| 176 | DAPK1 | GTTGGAGTTGAGGTTTGA |
| | (SEQ ID NO: 22) | (SEQ ID NO: 646) |
| 177 | DAPK1 | TTTTTTGTCGGATTGGTG |
| | (SEQ ID NO: 22) | (SEQ ID NO: 647) |
| 178 | DAPK1 | TTTTTTGTTGGATTGGTG |
| | (SEQ ID NO: 22) | (SEQ ID NO: 648) |
| 179 | DAPK1 | GAAGGGAGCGTATTTTAT |
| | (SEQ ID NO: 22) | (SEQ ID NO: 955) |
| 180 | DAPK1 | GAAGGGAGTGTATTTTAT |
| | (SEQ ID NO: 22) | (SEQ ID NO: 956) |
| 181 | DAPK1 | TTGTTTTTCGGAAATTTG |
| | (SEQ ID NO: 22) | (SEQ ID NO: 935) |
| 182 | DAPK1 | TTGTTTTTTGGAAATTTG |
| | (SEQ ID NO: 22) | (SEQ ID NO: 936) |
| 183 | EGRF | TTTGTATTCGGAGTTGGG |
| | (SEQ ID NO: 23) | (SEQ ID NO: 961) |
| 184 | EGRF | TTTGTATTTGGAGTTGGG |
| | (SEQ ID NO: 23) | (SEQ ID NO: 962) |
| 185 | EGRF | GATGATTTCGAGGGTGTT |
| | (SEQ ID NO: 23) | (SEQ ID NO: 649) |
| 186 | EGRF | GATGATTTTGAGGGTGTT |
| | (SEQ ID NO: 23) | (SEQ ID NO: 650) |
| 187 | EGRF | GAGGGTTTCGTAGTGTTG |
| | (SEQ ID NO: 23) | (SEQ ID NO: 651) |
| 188 | EGRF | GAGGGTTTTGTAGTGTTG |
| | (SEQ ID NO: 23) | (SEQ ID NO: 652) |
| 189 | EGRF | TGGGGATTCGAATAAAGG |
| | (SEQ ID NO: 23) | (SEQ ID NO: 653) |
| 190 | EGRF | TGGGGATTTGAATAAAGG |
| | (SEQ ID NO: 23) | (SEQ ID NO: 654) |
| 191 | EGRF | ATTTGGTTCGATTTGGAT |
| | (SEQ ID NO: 23) | (SEQ ID NO: 931) |
| 192 | EGRF | ATTTGGTTTGATTTGGAT |
| | (SEQ ID NO: 23) | (SEQ ID NO: 932) |
| 193 | EYA4 | TATATATACGTGTGGGTA |
| | (SEQ ID NO: 24) | (SEQ ID NO: 655) |
| 194 | EYA4 | TATATATATGTGTGGGTA |
| | (SEQ ID NO: 24) | (SEQ ID NO: 656) |
| 195 | EYA4 | AGTGTATGCGTAGAAGGT |
| | (SEQ ID NO: 24) | (SEQ ID NO: 923) |
| 196 | EYA4 | AGTGTATGTGTAGAAGGT |
| | (SEQ ID NO: 24) | (SEQ ID NO: 924) |
| 197 | EYA4 | TTTAGATACGAAATGTTA |
| | (SEQ ID NO: 24) | (SEQ ID NO: 657) |
| 198 | EYA4 | TTTAGATATGAAATGTTA |
| | (SEQ ID NO: 24) | (SEQ ID NO: 658) |
| 199 | EYA4 | AAGTAAGTCGTTGTTGTT |
| | (SEQ ID NO: 24) | (SEQ ID NO: 921) |
| 200 | EYA4 | AAGTAAGTTGTTGTTGTT |
| | (SEQ ID NO: 24) | (SEQ ID NO: 922) |
| 201 | GSTP1 | GGTTTTTTCGGTTAGTTG |
| | (SEQ ID NO: 25) | (SEQ ID NO: 659) |
| 202 | GSTP1 | GGTTTTTTTGGTTAGTTG |
| | (SEQ ID NO: 25) | (SEQ ID NO: 660) |
| 203 | GSTP1 | GGAGTTCGCGGGATTTTT |
| | (SEQ ID NO: 25) | (SEQ ID NO: 905) |
| 204 | GSTP1 | GGAGTTTGTGGGATTTTT |
| | (SEQ ID NO: 25) | (SEQ ID NO: 906) |
| 205 | GSTP1 | GTAGTTTTCGTTATTAGT |
| | (SEQ ID NO: 25) | (SEQ ID NO: 661) |
| 206 | GSTP1 | GTAGTTTTTGTTATTAGT |
| | (SEQ ID NO: 25) | (SEQ ID NO: 662) |
| 207 | GTBP/MSH6 | GAGGAATTCGGGTTTTAG |
| | (SEQ ID NO: 26) | (SEQ ID NO: 951) |
| 208 | GTBP/MSH6 | GAGGAATTTGGGTTTTAG |
| | (SEQ ID NO: 26) | (SEQ ID NO: 952) |
| 209 | GTBP/MSH6 | TTTGTTGGCGGGAAATTT |
| | (SEQ ID NO: 26) | (SEQ ID NO: 925) |
| 210 | GTBP/MSH6 | TTTGTTGGTGGGAAATTT |
| | (SEQ ID NO: 26) | (SEQ ID NO: 926) |
| 211 | GTBP/MSH6 | TTTTGTCGGACGGAGTTT |
| | (SEQ ID NO: 26) | (SEQ ID NO: 663) |
| 212 | GTBP/MSH6 | TTTTGTTGGATGGAGTTT |
| | (SEQ ID NO: 26) | (SEQ ID NO: 664) |
| 213 | GTBP/MSH6 | AAGGTTTAATCGTTTTGT |
| | (SEQ ID NO: 26) | (SEQ ID NO: 665) |
| 214 | GTBP/MSH6 | AAGGTTTAATTGTTTTGT |
| | (SEQ ID NO: 26) | (SEQ ID NO: 666) |
| 215 | HIC-1 | TTAAAACGGCGTATAGGG |
| | (SEQ ID NO: 27) | (SEQ ID NO: 667) |
| 216 | HIC-1 | TTAAAATGGTGTATAGGG |
| | (SEQ ID NO: 27) | (SEQ ID NO: 668) |
| 217 | HIC-1 | AGGAGATTCGAAAGTTTA |
| | (SEQ ID NO: 27) | (SEQ ID NO: 669) |
| 218 | HIC-1 | AGGAGATTTGAAAGTTTA |
| | (SEQ ID NO: 27) | (SEQ ID NO: 670) |
| 219 | HIC-1 | TTTTAGAGCGTTAGGGTT |
| | (SEQ ID NO: 27) | (SEQ ID NO: 1021) |
| 220 | HIC-1 | TTTTAGAGTGTTAGGGTT |
| | (SEQ ID NO: 27) | (SEQ ID NO: 1022) |
| 221 | HRAS | ATAGTGGGCGTAATTGGT |
| | (SEQ ID NO: 28) | (SEQ ID NO: 671) |
| 222 | HRAS | ATAGTGGGTGTAATTGGT |
| | (SEQ ID NO: 28) | (SEQ ID NO: 672) |
| 223 | HRAS | AAATTGGACGTTTAGTTG |
| | (SEQ ID NO: 28) | (SEQ ID NO: 673) |
| 224 | HRAS | AAATTGGATGTTTAGTTG |
| | (SEQ ID NO: 28) | (SEQ ID NO: 674) |
| 225 | HRAS | TAGAAGTCGAGAGATTTG |
| | (SEQ ID NO: 28) | (SEQ ID NO: 675) |
| 226 | HRAS | TAGAAGTTGAGAGATTTG |
| | (SEQ ID NO: 28) | (SEQ ID NO: 676) |
| 227 | HRAS | GAATATTTCGAAGTTTGT |
| | (SEQ ID NO: 28) | (SEQ ID NO: 677) |
| 228 | HRAS | GAATATTTTGAAGTTTGT |
| | (SEQ ID NO: 28) | (SEQ ID NO: 678) |
| 229 | IGF2 | AGTTTGAACGATGTAAGA |
| | (SEQ ID NO: 29) | (SEQ ID NO: 973) |
| 230 | IGF2 | AGTTTGAATGATGTAAGA |
| | (SEQ ID NO: 29) | (SEQ ID NO: 974) |
| 231 | IGF2 | GGTTATTACGATAATTTG |
| | (SEQ ID NO: 29) | (SEQ ID NO: 679) |
| 232 | IGF2 | GGTTATTATGATAATTTG |
| | (SEQ ID NO: 29) | (SEQ ID NO: 680) |
| 233 | IGF2 | TTGTATGGTCGAGTTTAT |
| | (SEQ ID NO: 29) | (SEQ ID NO: 941) |
| 234 | IGF2 | TTGTATGGTTGAGTTTAT |
| | (SEQ ID NO: 29) | (SEQ ID NO: 942) |
| 235 | IGF2 | GATTAGGGCGGGAAATAT |
| | (SEQ ID NO: 29) | (SEQ ID NO: 937) |
| 236 | IGF2 | GATTAGGGTGGGAAATAT |
| | (SEQ ID NO: 29) | (SEQ ID NO: 938) |
| 237 | IGF2 | TGGAGTTTACGGAGGTTT |
| | (SEQ ID NO: 29) | (SEQ ID NO: 681) |
| 238 | IGF2 | TGGAGTTTATGGAGGTTT |
| | (SEQ ID NO: 29) | (SEQ ID NO: 682) |
| 239 | LKB1 | TTAATTAACGGGTGGGTA |
| | (SEQ ID NO: 30) | (SEQ ID NO: 683) |
| 240 | LKB1 | TTAATTAATGGGTGGGTA |
| | (SEQ ID NO: 30) | (SEQ ID NO: 684) |
| 241 | LKB1 | TTTAGGTTCGTAAGTTTA |
| | (SEQ ID NO: 30) | (SEQ ID NO: 965) |
| 242 | LKB1 | TTTAGGTTTGTAAGTTTA |
| | (SEQ ID NO: 30) | (SEQ ID NO: 966) |
| 243 | LKB1 | AGGGAGGTCGTTGGTATT |
| | (SEQ ID NO: 30) | (SEQ ID NO: 933) |
| 244 | LKB1 | AGGGAGGTTGTTGGTATT |
| | (SEQ ID NO: 30) | (SEQ ID NO: 934) |
| 245 | MGMT | TAAGGATACGAGTTATAT |
| | (SEQ ID NO: 31) | (SEQ ID NO: 685) |
| 246 | MGMT | TAAGGATATGAGTTATAT |
| | (SEQ ID NO: 31) | (SEQ ID NO: 686) |
| 247 | MGMT | TTGGAGAGCGGTTGAGTT |
| | (SEQ ID NO: 31) | (SEQ ID NO: 687) |
| 248 | MGMT | TTGGAGAGTGGTTGAGTT |
| | (SEQ ID NO: 31) | (SEQ ID NO: 688) |
| 249 | MGMT | TAGGTTATCGGTGATTGT |
| | (SEQ ID NO: 31) | (SEQ ID NO: 689) |
| 250 | MGMT | TAGGTTATTGGTGATTGT |
| | (SEQ ID NO: 31) | (SEQ ID NO: 690) |
| 251 | MGMT | TAGGGGAGCGGTTTTAGG |
| | (SEQ ID NO: 31) | (SEQ ID NO: 691) |
| 252 | MGMT | TAGGGGAGTGGTTTTAGG |
| | (SEQ ID NO: 31) | (SEQ ID NO: 692) |
| 253 | MGMT | AGTAGGATCGGGATTTTT |
| | (SEQ ID NO: 31) | (SEQ ID NO: 1001) |
| 254 | MGMT | AGTAGGATTGGGATTTTT |
| | (SEQ ID NO: 31) | (SEQ ID NO: 1002) |
| 255 | MLH1 | TTGAGAAGCGTTAAGTAT |
| | (SEQ ID NO: 32) | (SEQ ID NO: 693) |
| 256 | MLH1 | TTGAGAAGTGTTAAGTAT |
| | (SEQ ID NO: 32) | (SEQ ID NO: 694) |
| 257 | MLH1 | TTAGGTAGCGGGTAGTAG |
| | (SEQ ID NO: 32) | (SEQ ID NO: 949) |
| 258 | MLH1 | TTAGGTAGTGGGTAGTAG |
| | (SEQ ID NO: 32) | (SEQ ID NO: 950) |
| 259 | MLH1 | GTAGTAGTCGTTTTAGGG |
| | (SEQ ID NO: 32) | (SEQ ID NO: 695) |
| 260 | MLH1 | GTAGTAGTTGTTTTAGGG |
| | (SEQ ID NO: 32) | (SEQ ID NO: 696) |
| 261 | MLH1 | ATAGTTGTCGTTGAAGGG |
| | (SEQ ID NO: 32) | (SEQ ID NO: 697) |
| 262 | MLH1 | ATAGTTGTTGTTGAAGGG |
| | (SEQ ID NO: 32) | (SEQ ID NO: 698) |
| 263 | MLH1 | TTGGATGGCGTAAGTTAT |
| | (SEQ ID NO: 32) | (SEQ ID NO: 699) |
| 264 | MLH1 | TTGGATGGTGTAAGTTAT |
| | (SEQ ID NO: 32) | (SEQ ID NO: 700) |
| 265 | MNCA9 | TAAAAGGGCGTTTTGTGA |
| | (SEQ ID NO: 33) | (SEQ ID NO: 701) |
| 266 | MNCA9 | TAAAAGGGTGTTTTGTGA |
| | (SEQ ID NO: 33) | (SEQ ID NO: 702) |
| 267 | MNCA9 | TAGTTAGTCGTATGGTTT |
| | (SEQ ID NO: 33) | (SEQ ID NO: 703) |
| 268 | MNCA9 | TAGTTAGTTGTATGGTTT |
| | (SEQ ID NO: 33) | (SEQ ID NO: 704) |
| 269 | MNCA9 | GATTTATTCGGAGAGGAG |
| | (SEQ ID NO: 33) | (SEQ ID NO: 705) |
| 270 | MNCA9 | GATTTATTTGGAGAAGAG |
| | (SEQ ID NO: 33) | (SEQ ID NO: 706) |
| 271 | MSH3 | ATTTTTCGTTCGATGATA |
| | (SEQ ID NO: 34) | (SEQ ID NO: 707) |
| 272 | MSH3 | ATTTTTTGTTTGATGATA |
| | (SEQ ID NO: 34) | (SEQ ID NO: 708) |
| 273 | MSH3 | AGTTTAGTCGGGGTTATA |
| | (SEQ ID NO: 34) | (SEQ ID NO: 709) |
| 274 | MSH3 | AGTTTAGTTGGGGTTATA |
| | (SEQ ID NO: 34) | (SEQ ID NO: 710) |
| 275 | MSH3 | GGGTGAAGCGTTGAGGTT |
| | (SEQ ID NO: 34) | (SEQ ID NO: 711) |
| 276 | MSH3 | GGGTGAAGTGTTGAGGTT |
| | (SEQ ID NO: 34) | (SEQ ID NO: 712) |
| 277 | MSH3 | AGTATTTTCGTTTGAGGA |
| | (SEQ ID NO:34) | (SEQ ID NO:1015) |
| 278 | MSH3 | AGTATTTTTGTTTGAGGA |
| | (SEQ ID NO: 34) | (SEQ ID NO: 1016) |
| 279 | MYC | TTAGAGTGTTCGGTTGTT |
| | (SEQ ID NO: 35) | (SEQ ID NO: 713) |
| 280 | MYC | TTAGAGTGTTTGGTTGTT |
| | (SEQ ID NO: 35) | (SEQ ID NO: 714) |
| 281 | MYC | TTATAATGCGAGGGTTTG |
| | (SEQ ID NO: 35) | (SEQ ID NO: 1019) |
| 282 | MYC | TTATAATGTGAGGGTTTG |
| | (SEQ ID NO: 35) | (SEQ ID NO: 1020) |
| 283 | MYC | AGGATTTTCGAGTTGTGT |
| | (SEQ ID NO: 35) | (SEQ ID NO: 715) |
| 284 | MYC | AGGATTTTTGAGTTGTGT |
| | (SEQ ID NO: 35) | (SEQ ID NO: 716) |
| 285 | MYC | AATTTTAGCGAGAGGTAG |
| | (SEQ ID NO: 35) | (SEQ ID NO: 717) |
| 286 | MYC | AATTTTAGTGAGAGGTAG |
| | (SEQ ID NO: 35) | (SEQ ID NO: 718) |
| 287 | N33 | TTGGTTCGGGAAAGGTAA |
| | (SEQ ID NO: 36) | (SEQ ID NO: 977) |
| 288 | N33 | TTGGTTTGGGAAAGGTAA |
| | (SEQ ID NO: 36) | (SEQ ID NO: 978) |
| 289 | N33 | TGTTATTTCGGAGGGTTT |
| | (SEQ ID NO: 36) | (SEQ ID NO: 909) |
| 290 | N33 | TGTTATTTTGGAGGGTTT |
| | (SEQ ID NO: 36) | (SEQ ID NO: 910) |
| 291 | N33 | GTTTAGTTAGCGGGTTTT |
| | (SEQ ID NO: 36) | (SEQ ID NO: 943) |
| 292 | N33 | GTTTAGTTAGTGGGTTTT |
| | (SEQ ID NO: 36) | (SEQ ID NO: 944) |
| 293 | N33 | ATTTAGTTCGGGGGAGGA |
| | (SEQ ID NO: 36) | (SEQ ID NO: 993) |
| 294 | N33 | ATTTAGTTTGGGGGAGGA |
| | (SEQ ID NO: 36) | (SEQ ID NO: 994) |
| 295 | PAX6 | TATTGTTTCGGTTGTTAG |
| | (SEQ ID NO: 37) | (SEQ ID NO: 719) |
| 296 | PAX6 | TATTGTTTTGGTTGTTAG |
| | (SEQ ID NO: 37) | (SEQ ID NO: 720) |
| 297 | PAX6 | GTTAGTAGCGAGTTTAGG |
| | (SEQ ID NO: 37) | (SEQ ID NO: 721) |
| 298 | PAX6 | GTTAGTAGTGAGTTTAGG |
| | (SEQ ID NO: 37) | (SEQ ID NO: 722) |
| 299 | PAX6 | AGAGTTTAGCGTATTTTT |
| | (SEQ ID NO: 37) | (SEQ ID NO: 723) |
| 300 | PAX6 | AGAGTTTAGTGTATTTTT |
| | (SEQ ID NO: 37) | (SEQ ID NO: 724) |
| 301 | PGR | GAATTTAGCGAGGGATTG |
| | (SEQ ID NO: 38) | (SEQ ID NO: 725) |
| 302 | PGR | GAATTTAGTGAGGGATTG |
| | (SEQ ID NO: 38) | (SEQ ID NO: 726) |
| 303 | PGR | AGTATGTACGAGTTTGAT |
| | (SEQ ID NO: 38) | (SEQ ID NO: 727) |
| 304 | PGR | AGTATGTATGAGTTTGAT |
| | (SEQ ID NO: 38) | (SEQ ID NO: 728) |
| 305 | PGR | TTAAGTGTCGGATTTGTG |
| | (SEQ ID NO: 38) | (SEQ ID NO: 1011) |
| 306 | PGR | TTAAGTGTTGGATTTGTG |
| | (SEQ ID NO: 38) | (SEQ ID NO: 1012) |
| 307 | PGR | GGGATAAACGATAGTTAT |
| | (SEQ ID NO: 38) | (SEQ ID NO: 729) |
| 308 | PGR | GGGATAAATGATAGTTAT |
| | (SEQ ID NO: 38) | (SEQ ID NO: 730) |
| 309 | PTEN | AGAGTTTGCGGTTTGGGG |
| | (SEQ ID NO: 39) | (SEQ ID NO: 731) |
| 310 | PTEN | AGAGTTTGTGGTTTGGGGT |
| | (SEQ ID NO: 39) | (SEQ ID NO: 732) |
| 311 | PTEN | ATTTTGCGTTCGTATTTA |
| | (SEQ ID NO: 39) | (SEQ ID NO: 987) |
| 312 | PTEN | ATTTTGTGTTTGTATTTA |
| | (SEQ ID NO: 39) | (SEQ ID NO: 988) |
| 313 | PTEN | AGAGTTATCGTTTTGTTT |
| | (SEQ ID NO: 39) | (SEQ ID NO: 957) |
| 314 | PTEN | AGAGTTATTGTTTTGTTT |
| | (SEQ ID NO: 39) | (SEQ ID NO: 958) |
| 315 | PTEN | TGATGTGGCGGGATTTTT |
| | (SEQ ID NO: 39) | (SEQ ID NO: 947) |
| 316 | PTEN | TGATGTGGTGGGATTTTT |
| | (SEQ ID NO: 39) | (SEQ ID NO: 948) |
| 317 | RARB | TAGTAGTTCGGGTAGGGT |
| | (SEQ ID NO: 40) | (SEQ ID NO: 991) |
| 318 | RARB | TAGTAGTTTGGGTAGGGT |
| | (SEQ ID NO: 40) | (SEQ ID NO: 992) |
| 319 | RARB | GGGTTTATCGAAAGTTTA |
| | (SEQ ID NO: 40) | (SEQ ID NO: 733) |
| 320 | RARB | GGGTTTATTGAAAGTTTA |
| | (SEQ ID NO: 40) | (SEQ ID NO: 734) |
| 321 | RARB | AGTTTATTCGTATATATT |
| | (SEQ ID NO: 40) | (SEQ ID NO: 735) |
| 322 | RARB | AGTTTATTTGTATATATT |
| | (SEQ ID NO: 40) | (SEQ ID NO: 736) |
| 323 | RARB | TTTTTATGCGAGTTGTTT |
| | (SEQ ID NO: 40) | (SEQ ID NO: 737) |
| 324 | RARB | TTTTTATGTGAGTTGTTT |
| | (SEQ ID NO: 40) | (SEQ ID NO: 738) |
| 325 | SFN | ATAGAGTTCGGTATTGGT |
| | (SEQ ID NO: 41) | (SEQ ID NO: 739) |
| 326 | SFN | ATAGAGTTTGGTATTGGT |
| | (SEQ ID NO: 41) | (SEQ ID NO: 740) |
| 327 | SFN | GTAGGTCGAACGTTATGA |
| | (SEQ ID NO: 41) | (SEQ ID NO: 741) |
| 328 | SFN | GTAGGTTGAATGTTATGA |
| | (SEQ ID NO: 41) | (SEQ ID NO: 742) |
| 329 | SFN | AAAAGTAACGAGGAGGGT |
| | (SEQ ID NO: 41) | (SEQ ID NO: 743) |
| 330 | SFN | AAAAGTAATGAGGAGGGT |
| | (SEQ ID NO: 41) | (SEQ ID NO: 744) |
| 331 | S100A2 | TTTAATTGCGGTTGTGTG |
| | (SEQ ID NO: 42) | (SEQ ID NO: 745) |
| 332 | S100A2 | TTTAATTGTGGTTGTGTG |
| | (SEQ ID NO: 42) | (SEQ ID NO: 746) |
| 333 | S100A2 | TATATAGGCGTATGTATG |
| | (SEQ ID NO: 42) | (SEQ ID NO: 747) |
| 334 | S100A2 | TATATAGGTGTATGTATG |
| | (SEQ ID NO: 42) | (SEQ ID NO: 748) |
| 335 | S100A2 | TATGTATACGAGTATTGG |
| | (SEQ ID NO: 42) | (SEQ ID NO: 999) |
| 336 | S100A2 | TATGTATATGAGTATTGG |
| | (SEQ ID NO: 42) | (SEQ ID NO: 1000) |
| 337 | S100A2 | AGTTTTAGCGTGTGTTTA |
| | (SEQ ID NO: 42) | (SEQ ID NO: 749) |
| 338 | S100A2 | AGTTTTAGTGTGTGTTTA |
| | (SEQ ID NO: 42) | (SEQ ID NO: 750) |
| 339 | TGFBR2 | ATTTGGAGCGAGGAATTT |
| | (SEQ ID NO: 43) | (SEQ ID NO: 751) |
| 340 | TGFBR2 | ATTTGGAGTGAGGAATTT |
| | (SEQ ID NO: 43) | (SEQ ID NO: 752) |
| 341 | TGFBR2 | TTGAAAGTCGGTTAAAGT |
| | (SEQ ID NO: 43) | (SEQ ID NO: 753) |
| 342 | TGFBR2 | TTGAAAGTTGGTTAAAGT |
| | (SEQ ID NO: 43) | (SEQ ID NO: 754) |
| 343 | TGFBR2 | AAAGTTTTCGGAGGGGTT |
| | (SEQ ID NO: 43) | (SEQ ID NO: 907) |
| 344 | TGFBR2 | AAAGTTTTTGGAGGGGTT |
| | (SEQ ID NO: 43) | (SEQ ID NO: 908) |
| 345 | TGFBR2 | GGTAGTTACGAGAGAGTT |
| | (SEQ ID NO: 43) | (SEQ ID NO: 755) |
| 346 | TGFBR2 | GGTAGTTATGAGAGAGTT |
| | (SEQ ID NO: 43) | (SEQ ID NO: 756) |
| 347 | TIMP3 | AGGTTTTTCGTTGGAGAA |
| | (SEQ ID NO: 44) | (SEQ ID NO: 757) |
| 348 | TIMP3 | AGGTTTTTTGTTGGAGAA |
| | (SEQ ID NO: 44) | (SEQ ID NO: 758) |
| 349 | TIMP3 | GAAAATATCGGTATTTTG |
| | (SEQ ID NO: 44) | (SEQ ID NO: 759) |
| 350 | TIMP3 | GAAAATATTGGTATTTTG |
| | (SEQ ID NO: 44) | (SEQ ID NO: 760) |
| 351 | TIMP3 | GGGATAAGCGAATTTTTT |
| | (SEQ ID NO: 44) | (SEQ ID NO: 761) |
| 352 | TIMP3 | GGGATAAGTGAATTTTTT |
| | (SEQ ID NO: 44) | (SEQ ID NO: 762) |
| 353 | TIMP3 | TTTTATTACGTATGTTTT |
| | (SEQ ID NO: 44) | (SEQ ID NO: 763) |
| 354 | TIMP3 | TTTTATTATGTATGTTTT |
| | (SEQ ID NO: 44) | (SEQ ID NO: 764) |
| 355 | TP53 | AAGTTGAACGTTTAGGTA |
| | (SEQ ID NO: 45) | (SEQ ID NO: 765) |
| 356 | TP53 | AAGTTGAATGTTTAGGTA |
| | (SEQ ID NO: 45) | (SEQ ID NO: 766) |
| 357 | TP53 | TTTTGAGTCGGTTTAAAG |
| | (SEQ ID NO: 45) | (SEQ ID NO: 767) |
| 358 | TP53 | TTTTGAGTTGGTTTAAAG |
| | (SEQ ID NO: 45) | (SEQ ID NO: 768) |
| 359 | TP53 | TATTTATTCGGTGTTGGG |
| | (SEQ ID NO: 45) | (SEQ ID NO: 769) |
| 360 | TP53 | TATTTATTTGGTGTTGGG |
| | (SEQ ID NO: 45) | (SEQ ID NO: 770) |
| 361 | TP53 | TTGGATTTCGAAATATTG |
| | (SEQ ID NO: 45) | (SEQ ID NO: 771) |
| 362 | TP53 | TTGGATTTTGAAATATTG |
| | (SEQ ID NO: 45) | (SEQ ID NO: 772) |
| 363 | TP73 | TGATTTAGCGTAGGTTTG |
| | (SEQ ID NO: 46) | (SEQ ID NO: 773) |
| 364 | TP73 | TGATTTAGTGTAGGTTTG |
| | (SEQ ID NO: 46) | (SEQ ID NO: 774) |
| 365 | TP73 | TTAGAGTTCGAGTTTATA |
| | (SEQ ID NO: 46) | (SEQ ID NO: 775) |
| 366 | TP73 | TTAGAGTTTGAGTTTATA |
| | (SEQ ID NO: 46) | (SEQ ID NO: 776) |
| 367 | TP73 | AAGTTACGGGTTTTATTG |
| | (SEQ ID NO: 46) | (SEQ ID NO: 915) |
| 368 | TP73 | AAGTTATGGGTTTTATTG |
| | (SEQ ID NO: 46) | (SEQ ID NO: 916) |
| 369 | TP73 | GGAAGTTTCGATGGTTTA |
| | (SEQ ID NO: 46) | (SEQ ID NO: 777) |
| 370 | TP73 | GGAAGTTTTGATGGTTTA |
| | (SEQ ID NO: 46) | (SEQ ID NO: 778) |
| 371 | VHL | TTTATAAGCGTGATGATT |
| | (SEQ ID NO: 47) | (SEQ ID NO: 779) |
| 372 | VHL | TTTATAAGTGTGATGATT |
| | (SEQ ID NO: 47) | (SEQ ID NO: 780) |
| 373 | VHL | GGTGTTTTCGTGTGAGAT |
| | (SEQ ID NO: 47) | (SEQ ID NO: 781) |
| 374 | VHL | GGTGTTTTTGTGTGAGAT |
| | (SEQ ID NO: 47) | (SEQ ID NO: 782) |
| 375 | VHL | TGTGAGATGCGTTATTTT |
| | (SEQ ID NO: 47) | (SEQ ID NO: 783) |
| 376 | VHL | TGTGAGATGTGTTATTTT |
| | (SEQ ID NO: 47) | (SEQ ID NO: 784) |
| 377 | VHL | TATATTGCGCGTTTGATA |
| | (SEQ ID NO: 47) | (SEQ ID NO: 785) |
| 378 | VHL | TATATTGTGTGTTTGATA |
| | (SEQ ID NO: 47) | (SEQ ID NO: 786) |
| 379 | CDKN1C | ATGAAGAACGGTTAAGGG |
| | (SEQ ID NO: 48) | (SEQ ID NO: 787) |
| 380 | CDKN1C | ATGAAGAATGGTTAAGGG |
| | (SEQ ID NO: 48) | (SEQ ID NO: 788) |
| 381 | CDKN1C | TTTTATTTCGAGTTAGGT |
| | (SEQ ID NO: 48) | (SEQ ID NO: 789) |
| 382 | CDKN1C | TTTTATTTTGAGTTAGGT |
| | (SEQ ID NO: 48) | (SEQ ID NO: 790) |
| 383 | CDKN1C | TTAAGTTACGGTTATTAG |
| | (SEQ ID NO: 48) | (SEQ ID NO: 791) |
| 384 | CDKN1C | TTAAGTTATGGTTATTAG |
| | (SEQ ID NO: 48) | (SEQ ID NO: 792) |
| 385 | CDKN1C | TTAGTGTTCGTTTGGAAT |
| | (SEQ ID NO: 48) | (SEQ ID NO: 793) |
| 386 | CDKN1C | TTAGTGTTTGTTTGGAAT |
| | (SEQ ID NO: 48) | (SEQ ID NO: 794) |
| 387 | CAV1 | TTGGTATCGTTGAAGAAT |
| | (SEQ ID NO: 49) | (SEQ ID NO: 795) |
| 388 | CAV1 | TTGGTATTGTTGAAGAAT |
| | (SEQ ID NO: 49) | (SEQ ID NO: 796) |
| 389 | CAV1 | TAGATTCGGAGGTAGGTA |
| | (SEQ ID NO: 49) | (SEQ ID NO: 911) |
| 390 | CAV1 | TAGATTTGGAGGTAGGTA |
| | (SEQ ID NO: 49) | (SEQ ID NO: 912) |
| 391 | CAV1 | TGGGGGTTCGAAAAAGTG |
| | (SEQ ID NO: 49) | (SEQ ID NO: 797) |
| 392 | CAV1 | TGGGGGTTTGAAAAAGTG |
| | (SEQ ID NO: 49) | (SEQ ID NO: 798) |
| 393 | CAV1 | GAAGTGTTCGTTTTTGTT |
| | (SEQ ID NO: 49) | (SEQ ID NO: 799) |
| 394 | CAV1 | GAAGTGTTTGTTTTTGTT |
| | (SEQ ID NO: 49) | (SEQ ID NO: 800) |
| 395 | CDH13 | GAAGTGGTCGTTAGTTTT |
| | (SEQ ID NO: 50) | (SEQ ID NO: 801) |
| 396 | CDH13 | GAAGTGGTTGTTAGTTTTT |
| | (SEQ ID NO: 50) | (SEQ ID NO: 802) |
| 397 | CDH13 | TTGTTTAGCGTGATTTGT |
| | (SEQ ID NO: 50) | (SEQ ID NO: 803) |
| 398 | CDH13 | TTGTTTAGTGTGATTTGT |
| | (SEQ ID NO: 50) | (SEQ ID NO: 804) |
| 399 | CDH13 | AAGGAATTCGTTTTGTAA |
| | (SEQ ID NO: 50) | (SEQ ID NO: 903) |
| 400 | CDH13 | AAGGAATTTGTTTTGTAA |
| | (SEQ ID NO: 50) | (SEQ ID NO: 904) |
| 401 | CDH13 | AATGTTTTCGTGATGTTG |
| | (SEQ ID NO: 50) | (SEQ ID NO: 895) |
| 402 | CDH13 | AATGTTTTTGTGATGTTG |
| | (SEQ ID NO: 50) | (SEQ ID NO: 896) |
| 403 | DRG1 | GAGTAGGACGGTGTTAAG |
| | (SEQ ID NO: 51) | (SEQ ID NO: 805) |
| 404 | DRG1 | GAGTAGGATGGTGTTAAG |
| | (SEQ ID NO: 51) | (SEQ ID NO: 806) |
| 405 | DRG1 | AAATTTAACGTTGGGTAG |
| | (SEQ ID NO: 51) | (SEQ ID NO: 807) |
| 406 | DRG1 | AAATTTAATGTTGGGTAG |
| | (SEQ ID NO: 51) | (SEQ ID NO: 808) |
| 407 | DRG1 | GATAATGACGGTGTTAGT |
| | (SEQ ID NO: 51) | (SEQ ID NO: 809) |
| 408 | DRG1 | GATAATGATGGTGTTAGT |
| | (SEQ ID NO: 51) | (SEQ ID NO: 810) |
| 409 | DRG1 | TGGTTGTACGTTAGGAGT |
| | (SEQ ID NO: 51) | (SEQ ID NO: 811) |
| 410 | DRG1 | TGGTTGTATGTTAGGAGT |
| | (SEQ ID NO: 51) | (SEQ ID NO: 812) |
| 411 | PTGS2 | TTTATTTTCGTGGGTAAA |
| | (SEQ ID NO: 52) | (SEQ ID NO: 913) |
| 412 | PTGS2 | TTTATTTTTGTGGGTAAA |
| | (SEQ ID NO: 52) | (SEQ ID NO: 914) |
| 413 | PTGS2 | AGTTATTTCGTTATATGG |
| | (SEQ ID NO: 52) | (SEQ ID NO: 1007) |
| 414 | PTGS2 | AGTTATTTTGTTATATGG |
| | (SEQ ID NO: 52) | (SEQ ID NO: 1008) |
| 415 | PTGS2 | ATTTAAGGCGATTAGTTT |
| | (SEQ ID NO: 52) | (SEQ ID NO: 813) |
| 416 | PTGS2 | ATTTAAGGTGATTAGTTT |
| | (SEQ ID NO: 52) | (SEQ ID NO: 814) |
| 417 | PTGS2 | ATATTTGGCGGAAATTTG |
| | (SEQ ID NO: 52) | (SEQ ID NO: 1023) |
| 418 | PTGS2 | ATATTTGGTGGAAATTTG |
| | (SEQ ID NO: 52) | (SEQ ID NO: 1024) |
| 419 | THBS1 | GGAGAGTTAGCGAGGGTT |
| | (SEQ ID NO: 53) | (SEQ ID NO: 815) |
| 420 | THBS1 | GGAGAGTTAGTGAGGGTT |
| | (SEQ ID NO: 53) | (SEQ ID NO: 816) |
| 421 | THBS1 | TATTTTAACGAATGGTTT |
| | (SEQ ID NO: 53) | (SEQ ID NO: 817) |
| 422 | THBS1 | TATTTTAATGAATGGTTT |
| | (SEQ ID NO: 53) | (SEQ ID NO: 818) |
| 423 | THBS1 | TTATAAAACGGGTTTAGT |
| | (SEQ ID NO: 53) | (SEQ ID NO: 819) |
| 424 | THBS1 | TTATAAAATGGGTTTAGT |
| | (SEQ ID NO: 53) | (SEQ ID NO: 820) |
| 425 | THBS1 | AGGTATTTCGGGAGATTA |
| | (SEQ ID NO: 53) | (SEQ ID NO: 821) |
| 426 | THBS1 | AGGTATTTTGGGAGATTA |
| | (SEQ ID NO: 53) | (SEQ ID NO: 822) |
| 427 | TPEF | ATTTGTTTCGATTAATTT |
| | (=TMEFF2; =HPP1) | (SEQ ID NO: 979) |
| | (SEQ ID NO: 54) | |
| 428 | TPEF | ATTTGTTTTGATTAATTT |
| | (=TMEFF2; =HPP1) | (SEQ ID NO: 980) |
| | (SEQ ID NO: 54) | |
| 429 | TPEF | ATAGGTTACGGGTTGGAG |
| | (=TMEFF2; =HPP1) | (SEQ ID NO: 917) |
| | (SEQ ID NO: 54) | |
| 430 | TPEF | ATAGGTTACGGGTTGGAG |
| | (=TMEFF2; =HPP1) | (SEQ ID NO: 918) |
| | (SEQ ID NO: 54) | |
| 431 | TPEF | AATTTGCGAACGTTTGGG |
| | (=TMEFF2; =HPP1) | (SEQ ID NO: 899) |
| | (SEQ ID NO: 54) | |
| 432 | TPEF | AATTTGTGAATGTTTGGG |
| | (=TMEFF2; =HPP1) | (SEQ ID NO: 900) |
| | (SEQ ID NO: 54) | |
| 433 | DNMT1 | AGTGGGTTCGTTTAAGTT |
| | (SEQ ID NO: 55) | (SEQ ID NO: 823) |
| 434 | DNMT1 | AGTGGGTTTGTTTAAGTT |
| | (SEQ ID NO: 55) | (SEQ ID NO: 824) |
| 435 | DNMT1 | TTTTTTACGCGGAGTAGT |
| | (SEQ ID NO: 55) | (SEQ ID NO: 825) |
| 436 | DNMT1 | TTTTTTATGTGGAGTAGT |
| | (SEQ ID NO: 55) | (SEQ ID NO: 826) |
| 437 | DNMT1 | GAGAGAGGCGATATTTTG |
| | (SEQ ID NO: 55) | (SEQ ID NO: 827) |
| 438 | DNMT1 | GAGAGAGGTGATATTTTG |
| | (SEQ ID NO: 55) | (SEQ ID NO: 828) |
| 439 | DNMT1 | GTATTAAACGGAGAGAGG |
| | (SEQ ID NO: 55) | (SEQ ID NO: 829) |
| 440 | DNMT1 | GTATTAAATGGAGAGAGG |
| | (SEQ ID NO: 55) | (SEQ ID NO: 830) |
| 441 | CEA | AAGTGTTCGCGGTTGTTT |
| | (SEQ ID NO: 56) | (SEQ ID NO: 1003) |
| 442 | CEA | AAGTGTTTGTGGTTGTTT |
| | (SEQ ID NO: 56) | (SEQ ID NO: 1004) |
| 443 | CEA | TTTTGAGTCGTAGTTTAG |
| | (SEQ ID NO: 56) | (SEQ ID NO: 831) |
| 444 | CEA | TTTTGAGTTGTAGTTTAG |
| | (SEQ ID NO: 56) | (SEQ ID NO: 832) |
| 445 | CEA | AATAGATACGGAGAGGGA |
| | (SEQ ID NO: 56) | (SEQ ID NO: 833) |
| 446 | CEA | AATAGATATGGAGAGGGA |
| | (SEQ ID NO: 56) | (SEQ ID NO: 834) |
| 447 | MB | AGAAGGTGCGTGAGAGGT |
| | (SEQ ID NO: 57) | (SEQ ID NO: 835) |
| 448 | MB | AGAAGGTGTGTGAGAGGT |
| | (SEQ ID NO: 57) | (SEQ ID NO: 836) |
| 449 | MB | GGGTTAGTCGGGGTATTT |
| | (SEQ ID NO: 57) | (SEQ ID NO: 837) |
| 450 | MB | GGGTTAGTTGGGGTATTT |
| | (SEQ ID NO: 57) | (SEQ ID NO: 838) |
| 451 | MB | GGGGATAGCGAGTTATTG |
| | (SEQ ID NO: 57) | (SEQ ID NO: 839) |
| 452 | MB | GGGGATAGTGAGTTATTG |
| | (SEQ ID NO: 57) | (SEQ ID NO: 840) |
| 453 | MB | TTAGATTGCGTTATGGGG |
| | (SEQ ID NO: 57) | (SEQ ID NO: 841) |
| 454 | MB | TTAGATTGTGTTATGGGG |
| | (SEQ ID NO: 57) | (SEQ ID NO: 842) |
| 455 | PCNA | TAAAGAGGCGGGGAGATT |
| | (SEQ ID NO: 58) | (SEQ ID NO: 1013) |
| 456 | PCNA | TAAAGAGGTGGGGAGATT |
| | (SEQ ID NO: 58) | (SEQ ID NO: 1014) |
| 457 | PCNA | TATGGATACGATTGGTTT |
| | (SEQ ID NO: 58) | (SEQ ID NO: 843) |
| 458 | PCNA | TATGGATATGATTGGTTT |
| | (SEQ ID NO: 58) | (SEQ ID NO: 844) |
| 459 | PCNA | GTATTAAACGGTTGTAGG |
| | (SEQ ID NO: 58) | (SEQ ID NO: 845) |
| 460 | PCNA | GTATTAAATGGTTGTAGG |
| | (SEQ ID NO: 58) | (SEQ ID NO: 846) |
| 461 | PCNA | TTTGAAGTCGAAATTAGT |
| | (SEQ ID NO: 58) | (SEQ ID NO: 847) |
| 462 | PCNA | TTTGAAGTTGAAATTAGT |
| | (SEQ ID NO: 58) | (SEQ ID NO: 848) |
| 463 | CDC2 | TGGAATTTCGATGTAAAT |
| | (SEQ ID NO: 59) | (SEQ ID NO: 849) |
| 464 | CDC2 | TGGAATTTTGATGTAAAT |
| | (SEQ ID NO: 59) | (SEQ ID NO: 850) |
| 465 | CDC2 | TAGTAGGACGATATTTTT |
| | (SEQ ID NO: 59) | (SEQ ID NO: 851) |
| 466 | CDC2 | TAGTAGGATGATATTTTT |
| | (SEQ ID NO: 59) | (SEQ ID NO: 852) |
| 467 | CDC2 | TAGTTATTCGGGAAGGTT |
| | (SEQ ID NO: 59) | (SEQ ID NO: 853) |
| 468 | CDC2 | TAGTTATTTGGGAAGGTT |
| | (SEQ ID NO: 59) | (SEQ ID NO: 854) |
| 469 | CDC2 | AAATTGTTCGTATTTGGT |
| | (SEQ ID NO: 59) | (SEQ ID NO: 855) |
| 470 | CDC2 | AAATTGTTTGTATTTGGT |
| | (SEQ ID NO: 59) | (SEQ ID NO: 856) |
| 471 | ESR1 | AGATATATCGGAGTTTGG |
| | (SEQ ID NO: 60) | (SEQ ID NO: 857) |
| 472 | ESR1 | AGATATATTGGAGTTTGG |
| | (SEQ ID NO: 60) | (SEQ ID NO: 858) |
| 473 | ESR1 | GTTTGGTACGGGGTATAT |
| | (SEQ ID NO: 60) | (SEQ ID NO: 859) |
| 474 | ESR1 | GTTTGGTATGGGGTATAT |
| | (SEQ ID NO: 60) | (SEQ ID NO: 860) |
| 475 | ESR1 | TTTTAAATCGAGTTGTGT |
| | (SEQ ID NO: 60) | (SEQ ID NO: 861) |
| 476 | ESR1 | TTTTAAATTGAGTTGTGT |
| | (SEQ ID NO: 60) | (SEQ ID NO: 862) |
| 477 | ESR1 | TATGAGTTCGGGAGATTA |
| | (SEQ ID NO: 60) | (SEQ ID NO: 863) |
| 478 | ESR1 | TATGAGTTTGGGAGATTA |
| | (SEQ ID NO: 60) | (SEQ ID NO: 864) |
| 479 | ESR1 | TGGAGGTTCGGGAGTTTA |
| | (SEQ ID NO: 60) | (SEQ ID NO: 969) |
| 480 | ESR1 | TGGAGGTTTGGGAGTTTA |
| | (SEQ ID NO: 60) | (SEQ ID NO: 970) |
| 481 | CASP8 | GAATGAGTCGAGGAAGGT |
| | (SEQ ID NO: 61) | (SEQ ID NO: 865) |
| 482 | CASP8 | GAATGAGTTGAGGAAGGT |
| | (SEQ ID NO: 61) | (SEQ ID NO: 866) |
| 483 | CASP8 | TATTGAGACGTTAAGTAA |
| | (SEQ ID NO: 61) | (SEQ ID NO: 867) |
| 484 | CASP8 | TATTGAGATGTTAAGTAA |
| | (SEQ ID NO: 61) | (SEQ ID NO: 868) |
| 485 | CASP8 | TAAGGTTACGTAGTTAGT |
| | (SEQ ID NO: 61) | (SEQ ID NO: 869) |
| 486 | CASP8 | TAAGGTTATGTAGTTAGT |
| | (SEQ ID NO: 61) | (SEQ ID NO: 870) |
| 487 | CASP8 | GTTAATAGCGGGGATTTT |
| | (SEQ ID NO: 61) | (SEQ ID NO: 871) |
| 488 | CASP8 | GTTAATAGTGGGGATTTT |
| | (SEQ ID NO: 61) | (SEQ ID NO: 872) |
| 489 | RASSF1 | GTAGTTTTCGAGAATGTT |
| | (SEQ ID NO: 62) | (SEQ ID NO: 873) |
| 490 | RASSF1 | GTAGTTTTTGAGAATGTT |
| | (SEQ ID NO: 62) | (SEQ ID NO: 874) |
| 491 | RASSF1 | TAATTAGAACGTTTTTTG |
| | (SEQ ID NO: 62) | (SEQ ID NO: 875) |
| 492 | RASSF1 | TAATTAGAATGTTTTTTG |
| | (SEQ ID NO: 62) | (SEQ ID NO: 876) |
| 493 | RASSF1 | TAGTTTTCGCGTAGAATT |
| | (SEQ ID NO: 62) | (SEQ ID NO: 877) |
| 494 | RASSF1 | TAGTTTTTGTGTAGAATT |
| | (SEQ ID NO: 62) | (SEQ ID NO: 878) |
| 495 | RASSF1 | TTTGTAGCGGGTGGAGTA |
| | (SEQ ID NO: 62) | (SEQ ID NO: 995) |
| 496 | RASSF1 | TTTGTAGTGGGTGGAGTA |
| | (SEQ ID NO: 62) | (SEQ ID NO: 996) |
| 497 | MSH4 | TTGTTTCGGCGGTTTTTT |
| | (SEQ ID NO: 63) | (SEQ ID NO: 879) |
| 498 | MSH4 | TTGTTTTGGTGGTTTTTT |
| | (SEQ ID NO: 63) | (SEQ ID NO: 880) |
| 499 | MSH4 | TTTTGGTACGTTAGGAGT |
| | (SEQ ID NO: 63) | (SEQ ID NO: 881) |
| 500 | MSH4 | TTTTGGTATGTTAGGAGT |
| | (SEQ ID NO: 63) | (SEQ ID NO: 882) |
| 501 | MSH4 | TAAATTTTCGGTTAGTTT |
| | (SEQ ID NO: 63) | (SEQ ID NO: 883) |
| 502 | MSH4 | TAAATTTTTGGTTAGTTT |
| | (SEQ ID NO: 63) | (SEQ ID NO: 884) |
| 503 | MSH4 | TTAGAGGTCGGTAGTTTA |
| | (SEQ ID NO: 63) | (SEQ ID NO: 885) |
| 504 | MSH4 | TTAGAGGTTGGTAGTTTA |
| | (SEQ ID NO: 63) | (SEQ ID NO: 886) |
| 505 | MSH5 | ATGTTTATCGTTTTGAGT |
| | (SEQ ID NO: 64) | (SEQ ID NO: 887) |
| 506 | MSH5 | ATGTTTATTGTTTTGAGT |
| | (SEQ ID NO: 64) | (SEQ ID NO: 888) |
| 507 | MSH5 | ATAGTTGTCGAATGTATG |
| | (SEQ ID NO: 64) | (SEQ ID NO: 889) |
| 508 | MSH5 | ATAGTTGTTGAATGTATG |
| | (SEQ ID NO: 64) | (SEQ ID NO: 890) |
| 509 | MSH5 | TAGAAGTGCGAAGGGGTA |
| | (SEQ ID NO: 64) | (SEQ ID NO: 891) |
| 510 | MSH5 | TAGAAGTGTGAAGGGGTA |
| | (SEQ ID NO: 64) | (SEQ ID NO: 892) |
| 511 | MSH5 | ATGTAATTCGAATGTTTT |
| | (SEQ ID NO: 64) | (SEQ ID NO: 893) |
| 512 | MSH5 | ATGTAATTTGAATGTTTT |
| | (SEQ ID NO: 64) | (SEQ ID NO: 894) |

[0091] TABLE 3

Oligonucleotides used in differentiation
between colon adenomas or carcinoma tissue
and healthy colon tissue.

| | | |
|---|---|---|
| No: | Gene | Oligo: |

| | | |
|---|---|---|
| 1 | CDH13 | AATGTTTTCGTGATGTTG |
| | (SEQ ID NO:50) | (SEQ ID NO:895) |
| 2 | CDH13 | AATGTTTTTGTGATGTTG |
| | (SEQ ID NO:50) | (SEQ ID NO:896) |
| 3 | CD44 | TTGTTTAGCGGATTTTAG |
| | (SEQ ID NO:20) | (SEQ ID NO:897) |
| 4 | CD44 | TTGTTTAGTGGATTTTAG |
| | (SEQ ID NO:20) | (SEQ ID NO:898) |
| 5 | TPEF | AATTTGCGAACGTTTGGG |
| | (=TMEFF2; =HPP1) | (SEQ ID NO:899) |
| | (SEQ ID NO:54) | |
| 6 | TPEF | AATTTGTGAATGTTTGGG |
| | (=TMEFF2; =HPP1) | (SEQ ID NO:900) |
| | (SEQ ID NO:54) | |
| 7 | CSPG2 | GGGTAACGTCGAATTTAG |
| | (SEQ ID NO:21) | (SEQ ID NO:901) |
| 8 | CSPG2 | GGGTAATGTTGAATTTAG |
| | (SEQ ID NO:21) | (SEQ ID NO:902) |
| 9 | CDH13 | AAGGAATTCGTTTTGTAA |
| | (SEQ ID NO:50) | (SEQ ID NO:903) |
| 10 | CDH13 | AAGGAATTTGTTTTGTAA |
| | (SEQ ID NO:50) | (SEQ ID NO:904) |
| 11 | GSTP1 | GGAGTTCGCGGGATTTTT |
| | (SEQ ID NO:25) | (SEQ ID NO:905) |
| 12 | GSTP1 | GGAGTTTGTGGGATTTTT |
| | (SEQ ID NO:25) | (SEQ ID NO:906) |
| 13 | TGFBR2 | AAAGTTTTCGGAGGGGTT |
| | (SEQ ID NO:43) | (SEQ ID NO:907) |
| 14 | TGFBR2 | AAAGTTTTTGGAGGGGTT |
| | (SEQ ID NO:43) | (SEQ ID NO:908) |
| 15 | N33 | TGTTATTTCGGAGGGTTT |
| | (SEQ ID NO:36) | (SEQ ID NO:909) |
| 16 | N33 | TGTTATTTTGGAGGGTTT |
| | (SEQ ID NO:36) | (SEQ ID NO:910) |
| 17 | CAV1 | TAGATTCGGAGGTAGGTA |
| | (SEQ ID NO:49) | (SEQ ID NO:911) |
| 18 | CAV1 | TAGATTGGAGGTAGGTA |
| | (SEQ ID NO:49) | (SEQ ID NO:912) |
| 19 | PTGS2 | TTTATTTTTGTGGGTAAA |
| | (SEQ ID NO:52) | (SEQ ID NO:913) |
| 20 | PTGS2 | TTTATTTTTGTGGGTAAA |
| | (SEQ ID NO:52) | (SEQ ID NO:914) |
| 21 | TP73 | AAGTTACGGGTTTTATTG |
| | (SEQ ID NO:46) | (SEQ ID NO:915) |
| 22 | TP73 | AAGTTATGGGTTTTATTG |
| | (SEQ ID NO:46) | (SEQ ID NO:916) |
| 23 | TPEF | ATAGGTTACGGGTTGGAG |
| | (=TMEFF2; =HPP1) | (SEQ ID NO:917) |
| | (SEQ ID NO:54) | |
| 24 | TPEF | ATAGGTTATGGGTTGGAG |
| | (=TMEFF2; =HPP1) | (SEQ ID NO:918) |
| | (SEQ ID NO:54) | |
| 25 | CD44 | GTGGGGTTCGGAGGTATA |
| | (SEQ ID NO:20) | (SEQ ID NO:919) |
| 26 | CD44 | GTGGGGTTTGGAGGTATA |
| | (SEQ ID NO:20) | (SEQ ID NO:920) |
| 27 | EYA4 | AAGTAAGTCGTTGTTGTT |
| | (SEQ ID NO:24) | (SEQ ID NO:921) |
| 28 | EYA4 | AAGTAAGTTGTTGTTGTT |
| | (SEQ ID NO:24) | (SEQ ID NO:922) |
| 29 | EYA4 | AGTGTATGCGTAGAAGGT |
| | (SEQ ID NO:24) | (SEQ ID NO:923) |
| 30 | EYA4 | AGTGTATGTGTAGAAGGT |
| | (SEQ ID NO:24) | (SEQ ID NO:924) |
| 31 | GTBP/MSH6 | TTTGTTGGCGGGAAATTT |
| | (SEQ ID NO:26) | (SEQ ID NO:925) |
| 32 | GTBP/MSH6 | TTTGTTGGTGGGAAATTT |
| | (SEQ ID NO:26) | (SEQ ID NO:926) |
| 33 | EGR4 | GGAGTTTTCGGTATATAT |
| | (SEQ ID NO:4) | (SEQ ID NO:927) |
| 34 | EGR4 | GGAGTTTTTGGTATATAT |
| | (SEQ ID NO:4) | (SEQ ID NO:928) |
| 35 | CDH1 | TAGTGGCGTCGGAATTGT |
| | (SEQ ID NO:15) | (SEQ ID NO:929) |
| 36 | CDH1 | TAGTGGTGTTGGAATTGT |
| | (SEQ ID NO:15) | (SEQ ID NO:930) |
| 37 | EGFR | ATTTGGTTCGATTTGGAT |
| | (SEQ ID NO:23) | (SEQ ID NO:931) |
| 38 | EGFR | ATTTGGTTTGATTTGGAT |
| | (SEQ ID NO:23) | (SEQ ID NO:932) |
| 39 | LKB1 | AGGGAGGTCGTTGGTATT |
| | (SEQ ID NO:30) | (SEQ ID NO:933) |
| 40 | LKB1 | AGGGAGGTTGTTGGTATT |
| | (SEQ ID NO:30) | (SEQ ID NO:934) |
| 41 | DAPK1 | TTGTTTTTCGGAAATTTG |
| | (SEQ ID NO:22) | (SEQ ID NO:935) |
| 42 | DAPK1 | TTGTTTTTTGGAAATTTG |
| | (SEQ ID NO:22) | (SEQ ID NO:936) |
| 43 | IGF2 | GATTAGGGCGGGAAATAT |
| | (SEQ ID NO:29) | (SEQ ID NO:937) |
| 44 | IGF2 | GATTAGGGTGGGAAATAT |
| | (SEQ ID NO:29) | (SEQ ID NO:938) |
| 45 | HLA-F | TATTTGGGCGGGTGAGTG |
| | (SEQ ID NO:10) | (SEQ ID NO:939) |
| 46 | HLA-F | TATTTGGGTGGGTGAGTG |
| | (SEQ ID NO:10) | (SEQ ID NO:940) |
| 47 | IGF2 | TTGTATGGTCGAGTTTAT |
| | (SEQ ID NO:29) | (SEQ ID NO:941) |
| 48 | IGF2 | TTGTATGGTTGAGTTTAT |
| | (SEQ ID NO:29) | (SEQ ID NO:942) |
| 49 | N33 | GTTTAGTTAGCGGGTTTT |
| | (SEQ ID NO:36) | (SEQ ID NO:943) |
| 50 | N33 | GTTTAGTTAGTGGGTTTT |
| | (SEQ ID NO:36) | (SEQ ID NO:944) |
| 51 | CSPG2 | AAAAATTCGCGAGTTTAG |
| | (SEQ ID NO:21) | (SEQ ID NO:945) |
| 52 | CSPG2 | AAAAATTTGTGAGTTTAG |
| | (SEQ ID NO:21) | (SEQ ID NO:946) |
| 53 | PTEN | TGATGTGGCGGGATTTTT |
| | (SEQ ID NO:39) | (SEQ ID NO:947) |
| 54 | PTEN | TGATGTGGTGGGATTTTT |
| | (SEQ ID NO:39) | (SEQ ID NO:948) |
| 55 | MLH1 | TTAGGTAGCGGGTAGTAG |
| | (SEQ ID NO:32) | (SEQ ID NO:949) |
| 56 | MLH1 | TTAGGTAGTGGGTAGTAG |
| | (SEQ ID NO:32) | (SEQ ID NO:950) |
| 57 | GTBP/MSH6 | GAGGAATTCGGGTTTTAG |
| | (SEQ ID NO:26) | (SEQ ID NO:951) |
| 58 | GTBP/MSH6 | GAGGAATTTGGGTTTTAG |
| | (SEQ ID NO:26) | (SEQ ID NO:952) |
| 59 | CALCA | ATTAGGTTCGTGTTTTAG |
| | (SEQ ID NO:14) | (SEQ ID NO:953) |
| 60 | CALCA | ATTAGGTTTGTGTTTTAG |
| | (SEQ ID NO:14) | (SEQ ID NO:954) |
| 61 | DAPK1 | GAAGGGAGCGTATTTTAT |
| | (SEQ ID NO:22) | (SEQ ID NO:955) |
| 62 | DAPK1 | GAAGGGAGTGTATTTTAT |
| | (SEQ ID NO:22) | (SEQ ID NO:956) |
| 63 | PTEN | AGAGTTATCGTTTTGTTT |
| | (SEQ ID NO:39) | (SEQ ID NO:957) |
| 64 | PTEN | AGAGTTATTGTTTTGTTT |
| | (SEQ ID NO:39) | (SEQ ID NO:958) |
| 65 | WT1 | TGTTATATCGGTTAGTTG |
| | (SEQ ID NO:9) | (SEQ ID NO:959) |
| 66 | WT1 | TGTTATATTGGTTAGTTG |
| | (SEQ ID NO:9) | (SEQ ID NO:960) |
| 67 | EGFR | TTTGTATTCGGAGTTGGG |
| | (SEQ ID NO:23) | (SEQ ID NO:961) |
| 68 | EGFR | TTTGTATTTGGAGTTGGG |
| | (SEQ ID NO:23) | (SEQ ID NO:962) |
| 69 | CSPG2 | AAGATTTTCGGTTAGTTT |
| | (SEQ ID NO:21) | (SEQ ID NO:963) |
| 70 | CSPG2 | AAGATTTTTGGTTAGTTT |
| | (SEQ ID NO:21) | (SEQ ID NO:964) |
| 71 | LKB1 | TTTAGGTTCGTAAGTTTA |
| | (SEQ ID NO:30) | (SEQ ID NO:965) |
| 72 | LKB1 | TTTAGGTTTGTAAGTTTA |
| | (SEQ ID NO:30) | (SEQ ID NO:966) |
| 73 | WT1 | TATATTGGCGAAGGTTAA |
| | (SEQ ID NO:9) | (SEQ ID NO:967) |
| 74 | WT1 | TATATTGGTGAAGGTTAA |
| | (SEQ ID NO:9) | (SEQ ID NO:968) |
| 75 | ESR1 | TGGAGGTTCGGGAGTTTA |
| | (SEQ ID NO:60) | (SEQ ID NO:969) |
| 76 | ESR1 | TGGAGGTTTGGGAGTTTA |
| | (SEQ ID NO:60) | (SEQ ID NO:970) |
| 77 | APC | TTTAATCGTATAGTTTGT |
| | (SEQ ID NO:12) | (SEQ ID NO:971) |
| 78 | APC | TTTAATTGTATAGTTTGT |
| | (SEQ ID NO:12) | (SEQ ID NO:972) |
| 79 | IGF2 | AGTTTGAACGATGTAAGA |
| | (SEQ ID NO:29) | (SEQ ID NO:973) |
| 80 | IGF2 | AGTTTGAATGATGTAAGA |
| | (SEQ ID NO:29) | (SEQ ID NO:974) |
| 81 | MYOD1 | AATTAGGTCGGATAGGAG |
| | (SEQ ID NO:8) | (SEQ ID NO:975) |
| 82 | MYOD1 | AATTAGGTTGGATAGGAG |
| | (SEQ ID NO:8) | (SEQ ID NO:976) |
| 83 | N33 | TTGGTTCGGGAAAGGTAA |
| | (SEQ ID NO:36) | (SEQ ID NO:977) |
| 84 | N33 | TTGGTTTGGGAAAGGTAA |
| | (SEQ ID NO:36) | (SEQ ID NO:978) |
| 85 | TPEF | ATTTGTTTCGATTAATTT |
| | (=TMEFF2; =HPP1) | (SEQ ID NO:979) |
| | (SEQ ID NO:54) | |
| 86 | TPEF | ATTTGTTTTGATTAATTT |
| | (=TMEFF2; =HPP1) | (SEQ ID NO:980) |
| | (SEQ ID NO:54) | |
| 87 | CDKN2a | AATAGTTACGGTCGGAGG |
| | (SEQ ID NO:18) | (SEQ ID NO:981) |
| 88 | CDKN2a | AATAGTTATGGTTGGAGG |
| | (SEQ ID NO:18) | (SEQ ID NO:982) |
| 89 | CDH1 | AGGGTTATCGCGTTTATG |
| | (SEQ ID NO:15) | (SEQ ID NO:983) |
| 90 | CDH1 | AGGGTTATTGTGTTTATG |
| | (SEQ ID NO:15) | (SEQ ID NO:984) |
| 91 | APC | TATTTTGGCGGGTTGTAT |
| | (SEQ ID NO:12) | (SEQ ID NO:985) |
| 92 | APC | TATTTTGGTGGGTTGTAT |
| | (SEQ ID NO:12) | (SEQ ID NO:986) |

[0092] TABLE 4

Oligonucleotides used in differentiation
between colon carcinoma tissue and
healthy colon tissue.

| | | |
|---|---|---|
| No: | Gene | Oligo: |

| | | |
|---|---|---|
| 1 | CDH13 | AATGTTTTCGTGATGTTG |
| | (SEQ ID NO:50) | (SEQ ID NO:895) |
| 2 | CDH13 | AATGTTTTTGTGATGTTG |
| | (SEQ ID NO:50) | (SEQ ID NO:896) |
| 3 | TPEF | AATTTGCGAACGTTTGGG |
| | (=TMEFF2; =HPP1) | (SEQ ID NO:899) |
| | (SEQ ID NO:54) | |
| 4 | TPEF | AATTTGTGAATGTTTGGG |
| | (=TMEFF2; =HPP1) | (SEQ ID NO:900) |
| | (SEQ ID NO:54) | |
| 5 | CDH13 | AAGGAATTCGTTTTGTAA |
| | (SEQ ID NO:50) | (SEQ ID NO:903) |
| 6 | CDH13 | AAGGAATTCGTTTTGTAA |
| | (SEQ ID NO:50) | (SEQ ID NO:904) |
| 7 | CSPG2 | GGGTAACGTCGAATTTAG |
| | (SEQ ID NO:21) | (SEQ ID NO:901) |
| 8 | CSPG2 | GGGTAATGTTGAATTTAG |
| | (SEQ ID NO:21) | (SEQ ID NO:902) |
| 9 | CD44 | TTGTTTAGCGGATTTTAG |
| | (SEQ ID NO:20) | (SEQ ID NO:897) |
| 10 | CD44 | TTGTTTAGTGGATTTTAG |
| | (SEQ ID NO:20) | (SEQ ID NO:898) |
| 11 | EYA4 | AGTGTATGCGTAGAAGGT |
| | (SEQ ID NO:24) | (SEQ ID NO:923) |
| 12 | EYA4 | AGTGTATGTGTAGAAGGT |
| | (SEQ ID NO:24) | (SEQ ID NO:924) |
| 13 | APC | TTTAATCGTATAGTTTGT |
| | (SEQ ID NO:12) | (SEQ ID NO:971) |
| 14 | APC | TTTAATTGTATAGTTTGT |
| | (SEQ ID NO:12) | (SEQ ID NO:972) |
| 15 | PTGS2 | TTTATTTTCGTGGGTAAA |
| | (SEQ ID NO:52) | (SEQ ID NO:913) |
| 16 | PTGS2 | TTTATTTTTGTGGGTAAA |
| | (SEQ ID NO:52) | (SEQ ID NO:914) |
| 17 | EYA4 | AAGTAAGTCGTTGTTGTT |
| | (SEQ ID NO:24) | (SEQ ID NO:921) |
| 18 | EYA4 | AAGTAAGTTGTTGTTGTT |
| | (SEQ ID NO:24) | (SEQ ID NO:922) |
| 19 | PTEN | ATTTTGCGTTCGTATTTA |
| | (SEQ ID NO:39) | (SEQ ID NO:987) |
| 20 | PTEN | ATTTTGTGTTTGTATTTA |
| | (SEQ ID NO:39) | (SEQ ID NO:988) |
| 21 | GSTP1 | GGAGTTCGCGGGATTTTT |
| | (SEQ ID NO:25) | (SEQ ID NO:905) |
| 22 | GSTP1 | GGAGTTTGTGGGATTTTT |
| | (SEQ ID NO:25) | (SEQ ID NO:906) |
| 23 | CAV1 | TAGATTCGGAGGTAGGTA |
| | (SEQ ID NO:49) | (SEQ ID NO:911) |
| 24 | CAV1 | TAGATTTGGAGGTAGGTA |
| | (SEQ ID NO:49) | (SEQ ID NO:912) |
| 25 | EGFR | ATTTGGTTCGATTTGGAT |
| | (SEQ ID NO:23) | (SEQ ID NO:931) |
| 26 | EGFR | ATTTGGTTTGATTTGGAT |
| | (SEQ ID NO:23) | (SEQ ID NO:932) |
| 27 | N33 | TGTTATTTCGGAGGGTTT |
| | (SEQ ID NO:36) | (SEQ ID NO:909) |
| 28 | N33 | TGTTATTTTGGAGGGTTT |
| | (SEQ ID NO:36) | (SEQ ID NO:910) |
| 29 | IGF2 | TTGTATGGTCGAGTTTAT |
| | (SEQ ID NO:29) | (SEQ ID NO:941) |
| 30 | IGF2 | TTGTATGGTTGAGTTTAT |
| | (SEQ ID NO:29) | (SEQ ID NO:942) |
| 31 | HLA-F | AGTTGTTTCGTAGATATT |
| | (SEQ ID NO:10) | (SEQ ID NO:989) |
| 32 | HLA-F | AGTTGTTTTGTAGATATT |
| | (SEQ ID NO:10) | (SEQ ID NO:990) |
| 33 | TPEF | ATAGGTTACGGGTTGGAG |
| | (=TMEFF2; =HPP1) | (SEQ ID NO:917) |
| | (SEQ ID NO:54) | |
| 34 | TPEF | ATAGGTTATGGGTTGGAG |
| | (=TMEFF2; =HPP1) | (SEQ ID NO:918) |
| | (SEQ ID NO:54) | |
| 35 | TP73 | AAGTTACGGGTTTTATTG |
| | (SEQ ID NO:46) | (SEQ ID NO:915) |
| 36 | TP73 | AAGTTATGGGTTTTATTG |
| | (SEQ ID NO:46) | (SEQ ID NO:916) |

[0093] TABLE 5

Oligonucleotides used in differentiation
between colon adenoma tissue and healthy
colon tissue.

| | | |
|---|---|---|
| No: | Gene | Oligo: |

| | | |
|---|---|---|
| 1 | CD44 | TTGTTTAGCGGATTTTAG |
| | (SEQ ID NO:20) | (SEQ ID NO:897) |
| 2 | CD44 | TTGTTTAGTGGATTTTAG |
| | (SEQ ID NO:20) | (SEQ ID NO:898) |
| 3 | HLA-F | TATTTGGGCGGGTGAGTG |
| | (SEQ ID NO:10) | (SEQ ID NO:939) |
| 4 | HLA-F | TATTTGGGTGGGTGAGTG |
| | (SEQ ID NO:10) | (SEQ ID NO:940) |
| 5 | TGFBR2 | AAAGTTTTCGGAGGGGTT |
| | (SEQ ID NO:43) | (SEQ ID NO:907) |
| 6 | TGFBR2 | AAAGTTTTTGGAGGGGTT |
| | (SEQ ID NO:43) | (SEQ ID NO:908) |
| 7 | GTBP/MSH6 | GAGGAATTCGGGTTTTAG |
| | (SEQ ID NO:26) | (SEQ ID NO:951) |
| 8 | GTBP/MSH6 | GAGGAATTTGGGTTTTAG |
| | (SEQ ID NO:26) | (SEQ ID NO:952) |
| 9 | GTBP/MSH6 | TTTGTTGGCGGGAAATTT |
| | (SEQ ID NO:26) | (SEQ ID NO:925) |
| 10 | GTBP/MSH6 | TTTGTTGGTGGGAAATTT |
| | (SEQ ID NO:26) | (SEQ ID NO:926) |
| 11 | LKB1 | AGGGAGGTCGTTGGTATT |
| | (SEQ ID NO:30) | (SEQ ID NO:933) |
| 12 | LKB1 | AGGGAGGTTGTTGGTATT |
| | (SEQ ID NO:30) | (SEQ ID NO:934) |
| 13 | CD44 | GTGGGGTTCGGAGGTATA |
| | (SEQ ID NO:20) | (SEQ ID NO:919) |
| 14 | CD44 | GTGGGGTTTGGAGGTATA |
| | (SEQ ID NO:20) | (SEQ ID NO:920) |
| 15 | N33 | GTTTAGTTAGCGGGTTTT |
| | (SEQ ID NO:36) | (SEQ ID NO:943) |
| 16 | N33 | GTTTAGTTAGTGGGTTTT |
| | (SEQ ID NO:36) | (SEQ ID NO:944) |
| 17 | CDH13 | AATGTTTTCGTGATGTTG |
| | (SEQ ID NO:50) | (SEQ ID NO:895) |
| 18 | CDH13 | AATGTTTTTGTGATGTTG |
| | (SEQ ID NO:50) | (SEQ ID NO:896) |
| 19 | TP73 | AAGTTACGGGTTTTATTG |
| | (SEQ ID NO:46) | (SEQ ID NO:915) |
| 20 | TP73 | AAGTTATGGGTTTTATTG |
| | (SEQ ID NO:46) | (SEQ ID NO:916) |
| 21 | PTEN | TGATGTGGCGGGATTTTT |
| | (SEQ ID NO:39) | (SEQ ID NO:947) |
| 22 | PTEN | TGATGTGGTGGGATTTTT |
| | (SEQ ID NO:39) | (SEQ ID NO:948) |
| 23 | N33 | TGTTATTTCGGAGGGTTT |
| | (SEQ ID NO:36) | (SEQ ID NO:909) |
| 24 | N33 | TGTTATTTTGGAGGGTTT |
| | (SEQ ID NO:36) | (SEQ ID NO:910) |
| 25 | TPEF | AATTTGCGAACGTTTGGG |
| | (=TMEFF2; =HPP1) | (SEQ ID NO:899) |
| | (SEQ ID NO:54 | |
| 26 | TPEF | AATTTGTGAATGTTTGGG |
| | (=TMEFF2; =HPP1) | (SEQ ID NO:900) |
| | (SEQ ID NO:54) | |
| 27 | GSTP1 | GGAGTTCGCGGGATTTTT |
| | (SEQ ID NO:25) | (SEQ ID NO:905) |
| 28 | GSTP1 | GGAGTTTGTGGGATTTTT |
| | (SEQ ID NO:25) | (SEQ ID NO:906) |
| 29 | EGFR | TTTGTATTCGGAGTTGGG |
| | (SEQ ID NO:23) | (SEQ ID NO:961) |
| 30 | EGFR | TTTGTATTTGGAGTTGGG |
| | (SEQ ID NO:23) | (SEQ ID NO:962) |
| 31 | RARB | TAGTAGTTCGGGTAGGGT |
| | (SEQ ID NO:40) | (SEQ ID NO:991) |
| 32 | RARB | TAGTAGTTTGGGTAGGGT |
| | (SEQ ID NO:40) | (SEQ ID NO:992) |
| 33 | N33 | ATTTAGTTCGGGGGAGGA |
| | (SEQ ID NO:36) | (SEQ ID NO:993) |
| 34 | N33 | ATTTAGTTTGGGGGAGGA |
| | (SEQ ID NO:36) | (SEQ ID NO:994) |
| 35 | CAV1 | TAGATTCGGAGGTAGGTA |
| | (SEQ ID NO:49) | (SEQ ID NO:911) |
| 36 | CAV1 | TAGATTTGGAGGTAGGTA |
| | (SEQ ID NO:49) | (SEQ ID NO:912) |
| 37 | TPEF | ATAGGTTACGGGTTGGAG |
| | (=TMEFF2; =HPP1) | (SEQ ID NO:917) |
| | (SEQ ID NO:54) | |
| 38 | TPEF | ATAGGTTATGGGTTGGAG |
| | (=TMEFF2; =HPP1) | (SEQ ID NO:918) |
| | (SEQ ID NO:54) | |
| 39 | CDKN2a | AATAGTTACGGTCGGAGG |
| | (SEQ ID NO:18) | (SEQ ID NO:981) |
| 40 | CDKN2a | AATAGTTATGGTTGGAGG |
| | (SEQ ID NO:18) | (SEQ ID NO:982) |
| 41 | N33 | TTGGTTCGGGAAAGGTAA |
| | (SEQ ID NO:36) | (SEQ ID NO:977) |
| 42 | N33 | TTGGTTTGGGAAAGGTAA |
| | (SEQ ID NO:36) | (SEQ ID NO:978) |
| 43 | MLH1 | TTAGGTAGCGGGTAGTAG |
| | (SEQ ID NO:32) | (SEQ ID NO:949) |
| 44 | MLH1 | TTAGGTAGTGGGTAGTAG |
| | (SEQ ID NO:32) | (SEQ ID NO:950) |
| 45 | APC | TATTTTGGCGGGTTGTAT |
| | (SEQ ID NO:12) | (SEQ ID NO:985) |
| 46 | APC | TATTTTGGTGGGTTGTAT |
| | (SEQ ID NO:12) | (SEQ ID NO:986) |
| 47 | CSPG2 | GGGTAACGTCGAATTTAG |
| | (SEQ ID NO:21) | (SEQ ID NO:901) |
| 48 | CSPG2 | GGGTAATGTTGAATTTAG |
| | (SEQ ID NO:21) | (SEQ ID NO:902) |
| 49 | CDH1 | TAGTGGCGTCGGAATTGT |
| | (SEQ ID NO:15) | (SEQ ID NO:929) |
| 50 | CDH1 | TAGTGGTGTTGGAATTGT |
| | (SEQ ID NO:15) | (SEQ ID NO:930) |
| 51 | PTGS2 | TTTATTTTCGTGGGTAAA |
| | (SEQ ID NO:52) | (SEQ ID NO:913) |
| 52 | PTGS2 | TTTATTTTTGTGGGTAAA |
| | (SEQ ID NO:52) | (SEQ ID NO:914) |
| 53 | RASSF1 | TTTGTAGCGGGTGGAGTA |
| | (SEQ ID NO:62) | (SEQ ID NO:995) |
| 54 | RASSF1 | TTTGTAGTGGGTGGAGTA |
| | (SEQ ID NO:62) | (SEQ ID NO:996) |
| 55 | WT1 | TATATTGGCGAAGGTTAA |
| | (SEQ ID NO:9) | (SEQ ID NO:967) |
| 56 | WT1 | TATATTGGTGAAGGTTAA |
| | (SEQ ID NO:9) | (SEQ ID NO:968) |
| 57 | CDKN2a | GGAGTTTTCGGTTGATTG |
| | (SEQ ID NO:18) | (SEQ ID NO:997) |
| 58 | CDKN2a | GGAGTTTTTGGTTGATTG |
| | (SEQ ID NO:18) | (SEQ ID NO:998) |
| 59 | ESR1 | TGGAGGTTCGGGAGTTTA |
| | (SEQ ID NO:60) | (SEQ ID NO:969) |
| 60 | ESR1 | TGGAGGTTTGGGAGTTTA |
| | (SEQ ID NO:60) | (SEQ ID NO:970) |
| 61 | IGF2 | GATTAGGGCGGGAAATAT |
| | (SEQ ID NO:29) | (SEQ ID NO:937) |
| 62 | IGF2 | GATTAGGGTGGGAAATAT |
| | (SEQ ID NO:29) | (SEQ ID NO:938) |
| 63 | MYOD1 | AATTAGGTCGGATAGGAG |
| | (SEQ ID NO:8) | (SEQ ID NO:975) |
| 64 | MYOD1 | AATTAGGTTGGATAGGAG |
| | (SEQ ID NO:8) | (SEQ ID NO:976) |
| 65 | CDH13 | AAGGAATTCGTTTTGTAA |
| | (SEQ ID NO:50) | (SEQ ID NO:903) |
| 66 | CDH13 | AAGGAATTTGTTTTGTAA |
| | (SEQ ID NO:50) | (SEQ ID NO:904) |
| 67 | EGR4 | GGAGTTTTCGGTATATAT |
| | (SEQ ID NO:4) | (SEQ ID NO:927) |
| 68 | EGR4 | GGAGTTTTTGGTATATAT |
| | (SEQ ID NO:4) | (SEQ ID NO:928) |
| 69 | S100A2 | TATGTATACGAGTATTGG |
| | (SEQ ID NO:42) | (SEQ ID NO:999) |
| 70 | S100A2 | TATGTATATGAGTATTGG |
| | (SEQ ID NO:42) | (SEQ ID NO:1000) |
| 71 | DAPK1 | TTGTTTTTCGGAAATTTG |
| | (SEQ ID NO:22) | (SEQ ID NO:935) |
| 72 | DAPK1 | TTGTTTTTTGGAAATTTG |
| | (SEQ ID NO:22) | (SEQ ID NO:936) |
| 73 | MGMT | AGTAGGATCGGGATTTTT |
| | (SEQ ID NO:31) | (SEQ ID NO:1001) |
| 74 | MGMT | AGTAGGATTGGGATTTTT |
| | (SEQ ID NO:31) | (SEQ ID NO:1002) |
| 75 | EYA4 | AAGTAAGTCGTTGTTGTT |
| | (SEQ ID NO:24) | (SEQ ID NO:921) |
| 76 | EYA4 | AAGTAAGTTGTTGTTGTT |
| | (SEQ ID NO:24) | (SEQ ID NO:922) |
| 77 | CEA | AAGTGTTCGCGGTTGTTT |
| | (SEQ ID NO:56) | (SEQ ID NO:1003) |
| 78 | CEA | AAGTGTTTGTGGTTGTTT |
| | (SEQ ID NO:56) | (SEQ ID NO:1004) |
| 79 | WT1 | TGTTATATCGGTTAGTTG |
| | (SEQ ID NO:9) | (SEQ ID NO:959) |
| 80 | WT1 | TGTTATATTGGTTAGTTG |
| | (SEQ ID NO:9) | (SEQ ID NO:960) |
| 81 | GPIb beta | GGAGTTCGGTCGGGTTTT |
| | (SEQ ID NO:7) | (SEQ ID NO:1005) |
| 82 | GPIb beta | GGAGTTTGGTTGGGTTTT |
| | (SEQ ID NO:7) | (SEQ ID NO:1006) |
| 83 | CALCA | ATTAGGTTCGTGTTTTAG |
| | (SEQ ID NO:14) | (SEQ ID NO:953) |
| 84 | CALCA | ATTAGGTTTGTGTTTTAG |
| | (SEQ ID NO:14) | (SEQ ID NO:954) |
| 85 | PTGS2 | AGTTATTTCGTTATATGG |
| | (SEQ ID NO:52) | (SEQ ID NO:1007) |
| 86 | PTGS2 | AGTTATTTTGTTATATGG |
| | (SEQ ID NO:52) | (SEQ ID NO:1008) |
| 87 | MYOD1 | GTGTTAGTCGTTTAGGGT |
| | (SEQ ID NO:8) | (SEQ ID NO:1009) |
| 88 | MYOD1 | GTGTTAGTTGTTTAGGGT |
| | (SEQ ID NO:8) | (SEQ ID NO:1010) |
| 89 | EYA4 | AGTGTATGCGTAGAAGGT |
| | (SEQ ID NO:24) | (SEQ ID NO:923) |
| 90 | EYA4 | AGTGTATGTGTAGAAGGT |
| | (SEQ ID NO:24) | (SEQ ID NO:924) |
| 91 | CSPG2 | AAAAATTCGCGAGTTTAG |
| | (SEQ ID NO:21) | (SEQ ID NO:945) |
| 92 | CSPG2 | AAAAATTTGTGAGTTTAG |
| | (SEQ ID NO:21) | (SEQ ID NO:946) |
| 93 | PGR | TTAAGTGTCGGATTTGTG |
| | (SEQ ID NO:38) | (SEQ ID NO:1011) |
| 94 | PGR | TTAAGTGTTGGATTTGTG |
| | (SEQ ID NO:38) | (SEQ ID NO:1012) |
| 95 | PCNA | TAAAGAGGCGGGGAGATT |
| | (SEQ ID NO:58) | (SEQ ID NO:1013) |
| 96 | PCNA | TAAAGAGGTGGGGAGATT |
| | (SEQ ID NO:58) | (SEQ ID NO:1014) |
| 97 | MSH3 | AGTATTTTCGTTTGAGGA |
| | (SEQ ID NO:34) | (SEQ ID NO:1015) |
| 98 | MSH3 | AGTATTTTTGTTTGAGGA |
| | (SEQ ID NO:34) | (SEQ ID NO:1016) |
| 99 | WT1 | TAGTGAGACGAGGTTTTT |
| | (SEQ ID NO:9) | (SEQ ID NO:1017) |
| 100 | WT1 | TAGTGAGATGAGGTTTTT |
| | (SEQ ID NO:9) | (SEQ ID NO:1018) |
| 101 | MYC | TTATAATGCGAGGGTTTG |
| | (SEQ ID NO:35) | (SEQ ID NO:1019) |
| 102 | MYC | TTATAATGTGAGGGTTTG |
| | (SEQ ID NO:35) | (SEQ ID NO:1020) |
| 103 | HIC-1 | TTTTAGAGCGTTAGGGTT |
| | (SEQ ID NO:27) | (SEQ ID NO:1021) |
| 104 | HIC-1 | TTTTAGAGTGTTAGGGTT |
| | (SEQ ID NO:27) | (SEQ ID NO:1022) |
| 105 | PTGS2 | ATATTTGGCGGAAATTTG |
| | (SEQ ID NO:52) | (SEQ ID NO:1023) |
| 106 | PTGS2 | ATATTTGGTGGAAATTTG |
| | (SEQ ID NO:52) | (SEQ ID NO:1024) |
| 107 | EGFR | ATTTGGTTCGATTTGGAT |
| | (SEQ ID NO:23) | (SEQ ID NO:931) |
| 108 | EGER | ATTTGGTTTGATTTGGAT |
| | (SEQ ID NO:23) | (SEQ ID NO:932) |
| 109 | LKB1 | TTTAGGTTCGTAAGTTTA |
| | (SEQ ID NO:30) | (SEQ ID NO:965) |
| 110 | LKB1 | TTTAGGTTTGTAAGTTTA |
| | (SEQ ID NO:30) | (SEQ ID NO:966) |
| 111 | IGF2 | TTGTATGGTCGAGTTTAT |
| | (SEQ ID NO:29) | (SEQ ID NO:941) |
| 112 | IGF2 | TTGTATGGTTGAGTTTAT |
| | (SEQ ID NO:29) | (SEQ ID NO:942) |
| 113 | PTEN | AGAGTTATCGTTTTGTTT |
| | (SEQ ID NO:39) | (SEQ ID NO:957) |
| 114 | PTEN | AGAGTTATTGTTTTGTTT |
| | (SEQ ID NO:39) | (SEQ ID NO:958) |
| 115 | BCL2 | TTTTGTTACGGTGGTGGA |
| | (SEQ ID NO:13) | (SEQ ID NO:1025) |
| 116 | BCL2 | TTTTGTTATGGTGGTGGA |
| | (SEQ ID NO:13) | (SEQ ID NO:1026) |
| 117 | AR | AGAGGTTGCGTTTTAGAG |
| | (SEQ ID NO:5) | (SEQ ID NO:1027) |
| 118 | AR | AGAGGTTGTGTTTTAGAG |
| | (SEQ ID NO:5) | (SEQ ID NO:1028) |
| 119 | CDH1 | AGGGTTATCGCGTTTATG |
| | (SEQ ID NO:15) | (SEQ ID NO:983) |
| 120 | CDH1 | AGGGTTATTGTGTTTATG |
| | (SEQ ID NO:15) | (SEQ ID NO:984) |

[0094] TABLE 6

Oligonucleotides used in differentiation
between colon carcinoma tissue and colon
adenoma tissue.

| | | |
|---|---|---|
| No: | Gene | Oligo: |

| | | |
|---|---|---|
| 1 | CDKN2a | GTTGTTTTCGGTTGGTGT |
| | (SEQ ID NO:18) | (SEQ ID NO:1029) |
| 2 | CDKN2a | GTTGTTTTTGGTTGGTGT |
| | (SEQ ID NO:18) | (SEQ ID NO:1030) |
| 3 | GPIb beta | GGAGTTCGGTCGGGTTTT |
| | (SEQ ID NO:7) | (SEQ ID NO:1005) |
| 4 | GPIb beta | GGAGTTTGGTTGGGTTTT |
| | (SEQ ID NO:7) | (SEQ ID NO:1006) |

[0095] TABLE 7
Crossreference table to relate numbers used in figure labelling
to ID numbers used throughout the document

| | |
|---|---|
| Number in Figures | Gene name |

Healthy vs Non-Healthy

| | |
|---|---|
| 50-D | CDH13 |
| 20-C | CD44 |
| 54-C | TPEF (=TMEFF2; =HPP1) |
| 21-C | CSPG2 |
| 50-C | CDH13 |
| 25-B | GSTP1 |
| 43-C | TGFBR2 |
| 36-B | N33 |
| 49-A | CAV1 |
| 52-C | PTGS2 |
| 46-A | TP73 |
| 54-B | TPEF (=TMEFF2; =HPP1) |
| 20-A | CD44 |
| 24-D | EYA4 |
| 24-B | EYA4 |
| 26-B | GTBP/MSH6 |
| 4-C | EGR4 |
| 15-E | CDH1 |
| 23-E | EGFR |
| 30-B | LKB1 |
| 22-D | DAPK1 |
| 29-D | IGF2 |
| 10-A | HLA-F |
| 29-C | IGF2 |
| 36-C | N33 |
| 21-D | CSPG2 |
| 39-D | PTEN |
| 32-B | MLH1 |
| 26-A | GTBP/MSH6 |
| 14-C | CALCA |
| 22-C | DAPK1 |
| 39-C | PTEN |
| 9-D | WT1 |
| 23-A | EGFR |
| 21-A | CSPG2 |
| 30-A | LKB1 |
| 9-C | WT1 |
| 60-E | ESR1 |
| 12-A | APC |
| 29-A | IGF2 |
| 8-D | MYOD1 |
| 36-A | N33 |
| 54-A | TPEF (=TMEFF2; =HPP1) |
| 18-E | CDKN2a |
| 15-D | CDH1 |
| 12-C | APC |

Healthy vs Carcinoma

| | |
|---|---|
| 50-D | CDH13 |
| 54-C | TPEF (=TMEFF2; =HPP1) |
| 50-C | CDH13 |
| 21-C | CSPG2 |
| 20-C | CD44 |
| 24-B | EYA4 |
| 12-A | APC |
| 52-C | PTGS2 |
| 24-D | EYA4 |
| 39-B | PGR |
| 25-B | GSTP1 |
| 49-A | CAV1 |
| 23-E | EGFR |
| 36-B | N33 |
| 29-C | IGF2 |
| 10-D | HLA-F |
| 54-B | TPEF (=TMEFF2; =HPP1) |
| 46-A | TP73 |

Healthy vs Adenoma

| | |
|---|---|
| 20-C | CD44 |
| 10-A | HLA-F |
| 43-C | TGFBR2 |
| 26-A | GTBP/MSH6 |
| 26-B | GTBP/MSH6 |
| 30-B | LKB1 |
| 20-A | CD44 |
| 36-C | N33 |
| 50-D | CDH13 |
| 46-A | TP73 |
| 39-D | PTEN |
| 36-B | N33 |
| 54-C | TPEF (=TMEFF2; =HPP1) |
| 25-B | GSTP1 |
| 23-A | EGFR |
| 40-A | RARB |
| 36-D | N33 |
| 49-A | CAV1 |
| 54-B | TPEF (=TMEFF2; =HPP1) |
| 18-E | CDKN2a |
| 36-A | N33 |
| 32-B | MLH1 |
| 12-C | APC |
| 21-C | CSPG2 |
| 15-E | CDH1 |
| 52-C | PTGS2 |
| 62-D | RASSF1 |
| 9-C | WT1 |
| 18-D | CDKN2a |
| 60-E | ESR1 |
| 29-D | IGF2 |
| 8-D | MYOD1 |
| 50-C | CDH13 |
| 4-C | EGR4 |
| 42-C | S100A2 |
| 22-D | DAPK1 |
| 31-E | MGMT |
| 24-D | EYA4 |
| 56-A | CEA |
| 9-D | WT1 |
| 7-E | GPIb beta |
| 14-C | CALCA |
| 52-D | PTGS2 |
| 8-B | MYOD1 |
| 24-B | EYA4 |
| 21-D | CSPG2 |
| 38-C | PGR |
| 58-A | PCNA |
| 34-D | MSH3 |
| 9-B | WT1 |
| 35-B | MYC |
| 27-C | HIC-1 |
| 52-B | PTGS2 |
| 23-E | EGFR |
| 30-A | LKB1 |
| 29-C | IGF2 |
| 39-C | PTEN |
| 13-D | BCL2 |
| 5-B | AR |
| 15-D | CDH1 |

Carcinoma vs Adenoma

| | |
|---|---|
| 18-B | CDKN2a |
| 7-E | GPIb beta |

1. A gene panel, comprising at least one target nucleic acid from the group of genes and/or their regulatory regions comprising MDR1, APOC2, CACNA1G, EGR4, AR, RB1, GPIb beta, MYOD1, WT1, HLA-F, ELK1, APC, BCL2, CALCA, CDH1, CDKN1A, CDKN1B (p27 Kip1), CDKN2a, CDKN2B, CD44, CSPG2, DAPK1, EGFR, EYA4, GSTP1, GTBP/MSH6, HIC-1, HRAS, IGF2, LKB1, MGMT, MLH1, MNCA9, MSH3, MYC, N33, PAX6, PGR, PTEN, RARB, SFN, S100A2, TGFBR2, TIMP3, TP53, TP73, VHL, CDKN1C, CAV1, CDH13, DRG1, PTGS2, THBS1, TPEF (=TMEFF2; =HPP1), DNMT1, CEA, MB, PCNA, CDC2, ESR1, CASP8, RASSF1, MSH4, MSH5, and wherein at least one target nucleic acid is selected from the gene CD44 or GPIb beta and/or their regulatory regions.

2. The gene panel according to claim 1, wherein the target nucleic acids are selected from the group of genes and/or their regulatory regions comprising APC, CALCA, CAV1, CD44, CDH1, CDH13, CDKN2a, CSPG2, DAPK1, EGFR, EGR4, ESR1, GSTP1, GTBP/MSH6, HLA-F, IGF2, LKB1, MLH1, MYOD1, N33, PTEN, PTGS2, TGFBR2, TP73, TPEF (=TMEFF2; —HPP1), WT1, and EYA4, and wherein at least one target nucleic acid is selected from the gene CD44 and/or its regulatory regions.

3. The gene panel according to claim 1, wherein the target nucleic acids are selected from the group of genes and/or their regulatory regions comprising APC, AR, BCL2, CALCA, CAV1, CD44, CDH1, CDH13, CDKN2a, CEA, CSPG2, DAPK1, EGFR, EGR4, ESR1, GPIb beta, GSTP1, GTBP/MSH6, HIC-1, HLA-F, IGF2, LKB1, MGMT, MLH1, MSH3, MYC, MYOD1, N33, PCNA, PGR, PTEN, PTGS2, RARB, RASSF1, S100A2, TGFBR2, TP73, TPEF (=TMEFF2; =HPP1), WT1, and EYA4, and wherein at least one target nucleic acid is selected from the gene CD44 and/or its regulatory regions.

4. The gene panel according to claim 1, wherein the target nucleic acids are selected from the group of genes and/or their regulatory regions comprising APC, CAV1, CD44, CDH13, CSPG2, EGFR, GSTP1, HLA-F, IGF2, N33, PTEN, PTGS2, TP73, TPEF (=TMEFF2; =HPP1), and EYA4, and wherein at least one target nucleic acid is selected from the gene CD44 and/or its regulatory regions.

5. The gene panel according to claim 1, wherein said target nucleic acids are selected from the group of genes and/or their regulatory regions consisting of GPIb beta and CDKN2a.

6. The gene panel according to any of claims 1 to 5, wherein said target nucleic acids are selected from the group comprising SEQ ID NO: 133 to SEQ ID NO: 388 and sequences complementary thereto.

7. The gene panel according to any of claims 1 to 6, wherein said panel is present in the form of a nucleic acid or peptide nucleic acid array for the analysis of colon cell proliferative disorders associated with the methylation state of said target nucleic acids.

8. The array according to claim 7, characterised in that a solid phase surface of said array is composed of silicon, glass, polystyrene, aluminium, steel, iron, copper, nickel, silver, or gold.

9. An oligonucleotide array, characterised in that said array comprises at least one oligomer, in particular an oligonucleotide or peptide nucleic acid (PNA)-oligomer, said oligomer comprising at least one base sequence of at least 10 nucleotides which hybridises to or is identical to a pretreated genomic DNA according to one of the SEQ ID NO: 133 to SEQ ID NO: 388, and wherein at least one target nucleic acid is selected from the pretreated genomic DNA of the gene CD44 or GPIb beta and/or their regulatory regions.

10. The oligonucleotide array according to claim 9, wherein the base sequence of the oligonucleotides includes at least one CpG or TpG dinucleotide sequence.

11. The oligonucleotide array according to claim 10, wherein the cytosine of said at least one CpG or TpG dinucleotide is/are located in the middle third of the oligomer.

12. The oligonucleotide array according to any of claims 9 to 11, wherein the base sequence of the oligonucleotides is selected from the group of SEQ ID NO: 519 to SEQ ID NO: 1030.

13. The oligonucleotide array according to any of claims 9 to 12, comprising a set of oligonucleotides selected from the group of at least two oligonucleotides according to SEQ ID NO: 986 to 895, at least two oligonucleotides according to SEQ ID NO: 895 to 906, 909 to 918, 921 to 924, 931, 932, 941, 942, 971, 972, and 987 to 990, at least two oligonucleotides according to SEQ ID NO: 895 to 954, 957 to 962, 965 to 970, 975 to 978, 981 to 986, and 991 to 1028, and at least two oligonucleotides according to SEQ ID NO: 1005, 1006, 1029, and 1030.

14. A method for detecting and differentiating between colon cell proliferative disorders, comprising the following steps;
a) providing a biological sample containing genomic DNA,
b) extracting said genomic DNA,
c) converting cytosine bases in said genomic DNA sample which are unmethylated at the 5-position, by treatment, to uracil or another base which is dissimilar to cytosine in terms of base pairing behaviour,
d) providing a panel or an array according to any of claims 1 to 13, and
e) identifying the methylation status of one or more cytosine positions based on said array.

15. The method according to claim 14, characterised in that the reagent is a solution of bisulfite, hydrogen sulfite or disulfite.

16. The method according to claim 14 or 15, characterised in that the fragments of said pretreated genomic DNA are amplified by means of the polymerase chain reaction CPCR) prior to step (d).

17. The method according to any of claims 14 to 16, characterised in that more than ten different fragments having a length of 100-2000 base pairs are amplified.

18. The method according to any of claims 14 to 17, characterised in that the amplification step is carried out using a set of primer oligonucleotides comprising SEQ ID NO: 389 to SEQ ID NO: 518.

19. The method according to any of claims 14 to 18, characterised in that the amplification step preferentially amplifies DNA which is of particular interest in healthy and/or diseased colon tissues, based on the specific genomic methylation status of colon tissue, as opposed to background DNA.

20. The method according to any of claims 14 to 19, characterised in that identifying the methylation status of one or more cytosine positions based on said array involves a hybridisation of each amplificate to an oligonucleotide or peptide nucleic acid (PNA)-oligomer.

21. The method according to claim 20, characterised in that the amplificates are labelled.

22. The method according to claim 21, further comprising detecting the amplificates or fragments of the amplificates by mass spectrometry.

23. A method for detecting and differentiating between colon cell proliferative disorders, comprising the following steps;
a) providing a biological sample containing genomic DNA,
b) extracting said genomic DNA,
c) providing a gene panel according to any of claims 1 to 6,
d) digesting the genomic DNA according to said gene panel with one or more methylation sensitive restriction enzymes, and
e) detection of the DNA fragments generated in the digest of step d).

24. The method according to claim 23, wherein the DNA digest is amplified prior to Step e).

25. The method according to claim 24, wherein the amplification is carried out by means of the polymerase chain reaction (PCR).

26. The method according to claim 24 or 25, wherein the amplification of more than one DNA fragments is carried out in one reaction vessel.

27. The method according to any of claims 14 to 26, wherein said method differentiates between normal colon tissue and colon cell proliferative disorder tissue, differentiates between colon adenoma tissue and normal colon tissue, differentiates between colon carcinoma tissue and normal colon tissue or differentiates between colon adenoma tissue and colon carcinoma tissue.

28. A kit comprising a bisulfite (=disulfite, hydrogen sulfite) reagent as well as oligonucleotides and/or PNA-oligomers comprising at least one base sequence of at least 10 nucleotides which hybridises to or is identical to a pretreated genomic DNA according to one of the SEQ ID NO: 133 to SEQ ID NO: 388, and wherein at least one base sequence is selected from the pretreated genomic DNA of the gene CD44 or GPIb beta and/or their regulatory regions.

29. Use of a gene panel according to any of claims 1 to 6 or of an array according to any of claims 7 to 13 for the detection of a predisposition to, differentiation between subclasses, diagnosis, prognosis, treatment, and/or monitoring of colon cell proliferative disorders.

The application's sequence listing, which the Patent Office published only in electronic form, follows.

SEQUENCE LISTING (1030 sequences)

SEQ ID NO: 1 - DNA, 2932 bp, Homo Sapiens
gccaagaacaaaatatatcaagataaggaaaatttgtagtcaagaatagaaaaaaattatggctttgaagtatgagttatttaaagaaagtggaaacatcctcagactatgcagtaaaaaacaaagtgattttcttcttctaaacttatgcaataaactgataggtaatatgtgaaagtcatagaatgtagactagaggatacaacaaacctatttcctctatgttcataagaagtaagaaaagctctgatgtgagttagcattgctttacaattttgaattgtgcagattgcacgtacttttcctcagtttgaagtaaatagtggacaggaaaaaatattaaatgttggcagtaaatatggaaggaaattacaactaatgtaatatgctaaaacatgctatgtttattttactaatttgaattaaaatgtaagaatttaaaatgccctggaaaaacacgggcattgatctgacgtctgaagttttaaaatattacacactttgaaatagcatttgtaccttgaaatacctgtctctatatattttttaaaacttcctttttctttcattccatttatcatcaaataaaggatgaacagatgtaactcagaaactgtcaagcatgctgaagaaagaccactgcagaaaaatttctcctagccttttcaaaggtgttaggaagcagaaaggtgatacagaattggagaggtcggagtttttgtattaactgtattaaatgcgaatcccgagaaaatttcccttaactacgtcctgtagttatatggatatgaagacttatgtgaactttgaaagacgtgtctacataagttgaaatgtccccaatgattcagctgatgcgcgtttctctacttgccctttctagagaggtgcaacggaagccagaacattcctcctggaaattcaacctgtttcgcagtttctcgaggaatcagcattcagtcaatccgggccgggagcagtcatctgtggtgaggctgattggctgggcaggaacagcgccggggcgtgggctgagcacagccgcttcgctctctttgccacaggaagcctgagctcattcgagtagcggctcttccaagctcaaagaagcagaggccgctgttcgtttcctttaggtctttccactaaagtcggagtatcttcttccaaaatttcacgtcttggtggccgttccaaggagcgcgaggtaggggcacgcaaagctgggagctactatgggacagttcccaagtgtcaggctttcagatttcctgaacttggtcttcacgggagaagggcttcttgaggcgtggatagtgtgaagtcctctggcaagtccatggggaccaagtggggttagatctagactcaggagctcctggagcagcgcccaaaccgtagtggcactggaccatgttgcccggagcgcgcacagcccgcgcggtgcggggacctgctctctgagcccgcgggcggtgggtgggaggaagcatcgtccgcggcgactggaaccgggagggagaatcgcactggcggcgggcaaagtccagaacgcgctgccagacccccaactctgccttcgtggagatgctggagaccccgcgcacaggaaagcccctgcagtgcccatcgcggccagagcagctggggcatcaacggcgggcgctccctcttactgctctctggcttcgacgggggactagaggttagtctcacctccagcgcgcctgaggctcatgcatttggctaatgagctgcggtttctcttcaggtcgggatggatcttgaaggggaccgcaatggaggagcaaagaagaagaacttttttaaactgaacaataaaaggtaactagcttgtttcattttcatagtttacatagttgcgagatttgagtaatttatttctagcctccagctctgaaataaatgacatgttgttgtttttaattatttttaagaaacgcaagctagcctttggaatcaatatccctgcttagagcagaagtttgttggctgagtggagcacagcatatgcattttccctgtcttttttgttctttcttttaatgatacataatattttacatatttatgaaatggggtacatggaagcgttttttacatgcccggaatgtgtaatgatcaagtccgggtatttgaaggatacatcaccttaggtatatttcatttctatgtgttgataacattttaagtcttctagctactttgaaatatacaatatattgctaactgtagtcaccctcgtctgctatcgaacattggaacttatttgtcctatccaaccgttcttagtcattcaccaacctcttttcatttcacctttttacccttcccggcctctttcccttagtcttggtgtgcctctttctcagctttcctgccccagacaggcggatgctcatatgtgtttctgtcttatgaacttctgcttttcaagtggtgttggtcgcccacacgtgagccatatgctgctggtgatctgctctgtggtccaggctcttgcttccggtaaatggctatgtaaacatcgcgtttgtggcctggctgatgagacagaaggtcaaaagtacatttaggttgttaactggcaataaatatctgtatataatattggtaatgtaatcatatagggaaaataattatttaaagtaaattttgatcatggtgctctgcctttatagaatatttaaaacttcactaaatagattcattgttagtagtaaattgtaaaatagactagtaagtttaataatattagaaactgtaatgtaaattataagataaattagctaaacacattaatattataagaaaccaagcttttcagtgtaagagaaaaaatacaaatgtggaaatcaaatacatttttaaaaataatgttaagtttgaattagaaatttcaatatgaatt

SEQ ID NO: 2 - DNA, 7432 bp, Homo Sapiens
atctgaagccagagtcacccagaggagaaagagttggaattgagaactcaaggaatgcttggaagtgatcgggctcgagcccacctaggaagaaacagaggctggagacatgagactgtgttgctatttcctctcatcaacccttgggccctattgaggccctaccacaagcctggccctgcagcccagtgactaggagaaattagacacaagataataataacagcaatgatcttttttttttttctgagacggagtcttgctctttcgcccaggctggactgcagtggcgcgatctcggctcaatgcaagctccacctcccaggttcacgccattctcctgcctcagcctcccgagtagctaggactacaggcgcctgccaccacgcctggctaatttttcatatttttagtagagatggggtttcaccgtgttagccaagatggtctcaatctcctgacctcgtgatccgcctgcctcggcctcccaaagtgttggggttacaggcatgagccaccgcgcctggccaacagcaatgatctttgagcacctatattgccagtctccacggtaagagctttcttcattttttgttttgttttgtttcaagacagagtcttgctctgtcacccaggctggagtgcagtggtgtgatcgcggctcactgcagccttcacttcccgggttcaagccattctcctgcctcagcctcccaagtagctgggattacaggcacgcatcactacttctggctaatttttgtatttttagtagggacagggtttttcaccatgttggccaggttggtctcaaactcctggcctcatatgatctgcccacctcggcctcccaaagtgctgggattacaggcgtgagccactgcgcctttctttgtatttgttcaagtaatatactgaaatatgtactgtgcctcccactttatggaggaggaaactgaggccagcaaatgaggctgtcatgggaggtggagacaggatttgaacctgcctcagtgcaggaggctcaagagcctctgtcttctctcagggcactgtgtgggagggtgagaaggagggaggcccacagaggcatgacctctgattgccactgtcacctgggccctgctctctgaagtctctgccaagcggggaggtggccgggggagggccctgctctgtgcagcctcccctcccccggcccgcagagttgagcacagagggacagaggcacggaacccccagaaatgtccctcctcagaaacaggctccaggccctgcctgccctgtgcctctgcgtgctggtcctggcctgcattgggggtgagaagaagtgggtggagggatgtggggcccacacctggtgggtgtgagtgtggctgtgtgtcctgtggctctgtagccacgtgagacatgagtacggagtgtgtgcgtttcatggcgtgcgtatgcatgtgcgtgtcggggagtgtgtgtgtcggtggctgagagtgaagtgtgaatgtcacattggtacaaactgggatcatctgtgtgtgtgcacgtgcgtgcgtggaagtgggagtatgcagtcgtggtaaaaaagtgcatgtctgtgtgcatatgtgtatttgtgtgcacctgtctctctgtggggtatgtgtgtgcaaaatatttgagtgtgtggacatgtgtgagggggtgagtgtgtgctggtgtgtacgtctgtgttttgcatatgcatttttttttttttttttgagacggagtctcactctgtcacccaggctggagtgcagtggtagcagtggtgcgatcttggctcactgcatcatccgcctacccgtttcaagggattctcctgcctcagtcttcagagtatttgggactacagacacacgccaccatgcctggctattttttttttttgagacggagtctcgctctgttacccaggctggagtgcagtggcgtgatcttggctcactgcaacgtccgcctcccgggttcacgccattctcctgcctcagcctcccgagtagctgggactacaggagcccaccaccacgcctggctaattttttgtatttttactagagacggggtttcgccgtgttagccaggatggtctccatatcctgacctcgtgatccgcctgcctcggccttccaaagtgctaggattataggcgtgagccactgcgcctggccaatgcctggctaatttttttatatttttggtagagacagggttttgccatgttgcccaggctggtcttgaaatcctgacctcaggtgatccgcccgccttggcctcccaaagtgctgggattacaggcatgagccaccacgcccggccatgtactttatgttaaaatgggatcatattctagatcagcattatccagtagaaatttaaatttttaatacagggccaggcacggtggctcatgcctgtaatcccagcactttcggaggccgaggcgggtggatcgcaaggtcaggagatttgagatcatcctggctaacagatgggtaaaaacccatctctactaaaaatacaaaaaattagccatgcatggtggcatgcgcctgtagtcccagctactcgggaggctgaggccggagaatcacttgaacccgggaggcagaggttgcagtgagccgagatcgcgccactgcattccaacctgggtgacagagcgagactccgtctgaaaaaaaaaaaaaatttaacacgtatgtagacaatgtgcaaggcaccattccatgtgcatcgtatgtagtaactcttaattctcacgataaccctgaggtagatattattaccccgttctacaaaaggagaaacagtcctggggagacaggataagtcaccggccaaggcacacagctagctacatgtggcccccgcgtgacggctggtctctgtaggcgaggctttgtccagatgcgtgggtagaaggtctggcccggaaagaggaactgacagcaaggctaagccaatgtctgcccctgggggcagaaagtcacctcctgctctccctccactgtccacagaggtagctcagacagggtgggggtcacaggagaacgaagggagaagggggtagttcctgggcagcaaaatcaggtggtgaagggaggcatcagaggatggcaattagagaggccattagaggggaaccacaggcagacagggtgacaggagggactactgacacaaggtgaagagatggcccagccggacggggtggctcacatctgtaatcccagcattttgggagcccgaggtgggtggatcacttgaggtcaggagttcgaggccccaacatggcaaaaccccatctcttctaaaaatacaaaaattagccgggcatgatggcagatgcctgtaatccctgctactcgggaggctgaggcaggaaaattgcctgaatccaggaggtggaggttgcaatgagacgagatcatgacactgcactccaccctgggcaacagagcaagagactgactctgtctcataaaaaaaaagaaaaaagaaaaaaaaaaagagatggctgatggttaaagaggggttagcggtcaggggacacataagggtaaaggcaggaggcaagaggactggcagggggctgcccctgggccaccgggagcgacacaggatgagcatggagggaaagggagaaggggattctagggtcccagcctacccaagttgccctctggttccacctagcatgccagccagaggcccaggaaggaaccctgagccccccaccaaagctaaagatgagtcgctggagcctggtgaggggcaggatgaaggagctgctggagacagtggtgaacaggaccagagacgggtggcaatggttctggtgagggtgtgctgggctgggtggtgggaggggactcctgggtctgagggaggaggggctggggcctggacccctgagtctcagggaggaggaaagggtgggagtggggctgtgacccctaggtctgggaggagtggagggttagagctgagagcaggaactcctaggtcacagagaggagcggataaatggggcagagaacacctggggagagctggggcctccactgtgatgtcctctctcctgtaggagcccgagcaccttccggggcttcatgcagacctactatgacgaccacctgagggacctgggtccgctcaccaaggcctggttcctcgaatccaaagacagcctcttgaagaagacccacagcctgtgccccaggcttgtctgtggggacaaggaccagggttaaaatgttcataaaagccaggtgtggttgtggcgggtgcctgtagtcccagctactcaggaggctgaggtaggatgatggcttgagcccaggagttcgagaccagcctgggcaacacagcgagatctcttgggggtaaaacaaaaagaaaaaaaaaagttcatacttctccaataaataaagtctcacctgtgtccctgtctggatccttccccagtgtggccagaaaaaaacccaccccactgcctcccaggaatcaatgagtagaagaggtgacacctgatggggaaggaagagtagggaggtcgggaagggtatcaaggaataacaccctattgtgggcttgcggagaatgggggacttcaaggcgtgtcagtttcaggagggtgagggcaggagcgtgggtggagtcagcaggtccccatgatggccctcactgagagcttcgcccttgtctcctacaagctctgactccattcccagtgggcacccagcacctccaacccctccacagcccccaacccagcctctgtcggaggcgaattctcagagtgagggttccctgtcacttgagagaaggttccctgtgacgtgaccttgggggacgtcattgccctttctgtccccacccaccccctccgcagttctgttggccaggactttggcctagacaaaggatgggggttgtggctgtggagcggaagtgggtctcaaccactataaatcctctctgtgcccgtccggagctggtgaggacagcctgccagagtctggtaagaaagggactcagggtgcggggacaggggggcgtcagcagggagagggcaaagatcgataaagcaggaattttaagaggcacaatattagaagcccgtgttggaaccatgactgtgtgtgtgtgtgtgtgtgtgtgtgtgtgtgtgtgtgtgtgtgagagagagagagagggagatggagtctcgctatgtagcccaggctagactcaaactcctgggctcaagcaatcctcctgcctcagcctccccagtagctgggactacaggtgcaccaccacactccacaaatcacagaatttagaactgtagactatttgagcttctgcttagagttagggtggctgaggtggggaggatcccttgagcccaggagtttgaggatgcagtgagctgtgatcttgccaccgtgttccagcctgggtgacagagaaaccccatttctaaaaaagagaaagaaaaagggataggtacaatggctcatgcctgtaatcccagcactctgggaggccgaggcgggtggatcacttgaggtcaggagttcgacaccagccttaccagcatggtgaaaccgcatctatactaaaaatacaaaaattggccgggtgtggtagcatatgcctgtaatcccagctattccagaggctgagacaggagaattgcttgaacccaggaagcggaggttgcagtgagcccagatcgtgccactgtactctagcctgggtgacagagcaagactcagtcttggcggaaaaaaagaatgaaaaaatttaaaaaactaaaaaagaactgtaggctgggcgtggtggcttacacttgtaatccaaacgctttgggaggccaaggcaaacggatcacttgatgtcaggagttggagaccagcctggccaacatggtgaaaccccgtctctactaaaaatacaaaaattagacaggcatggtggtgcatgcttgtatttccagttactcaggaggctgaggcaggagaatcgctcgaacccggaagacagaggttgcggtgagccaaaattgcgccatcgcactccagcctgggcgagagaacaagaccttgtcttggaaaaaaaaaaagaattgtagaccatttgcttgtgttctttctccggggatcagatctcaccctctttctgccgtacttcctcatctcctacgtgtggatgatgatattgtgccctgtgcatgttcttcgtcaccaaaagtgcctctctcatagagcaggtgagaactcagtgaggagatgcagggacatgaggtctgacttagggcagagccctaaggtaacacatttgatctactgtaggtccttaatggtgtctgcagagcacctccctgcactgactcagccttagcaaagggcagaggctttgctgtgttccctgctgggcccagaactgtttaggtgctcaagaaagccttctaggctgggctcagtggctcacacctgtactcccagcaccctggggaggccgagatgggaggatcgcttgagcccaggagttccagaccagcctgggcaacaaaacaagtctcccatctctacaaaagaataaaaattagcagctgggcatggtggctcatgcctgtaattccagcactttgggaggccaaggcaggcaaatcacttgaggttaggagttcaagaccagcctggccaacatggtgaaaccccatctctactaaaaatacaaaaatcaggtggggcacagtggctcaagcctgtaatcctagcactttgggaggccaaggtgggcggatcacgaggtcagaagttcgagaccagcctggccagcatggtgaaaccccatctctactaaaaatacaaaatattagccgggcatggtggcaggtgcttgtgattccagctccttgggaggctgaggcagaagaattgctagaaccctggaggcagaggttgcagtgagccgagaacacgccactgcactccagcctgggtgacagagcgagactccatctcaaaaaatacgaaaacaaaaatcagccgggtggtggcgggtgcctgtaatcccagctactggggaggctgaggcaggagaattgcttgaacctgggaggtgggggttgcagtgagccaagattgcaccactgcactccagcctgggcaacagagtgagattccatctcaaaaaagaaaaaaataataattaaaatgttaaaatcaggagtagaatcacagaatgttggaaagtgaggcccaagaagggggctgtgtccaagtccatgcatgggaaacttgactgggacaccgagctcacacagagcaggatctcagtcccccccaccagagtggggcgtgaccacaggaacagccgcctccagtcagcctgccacatgacaccccctcaatgttccagg

SEQ ID NO: 3 - DNA, 12423 bp, Homo Sapiens
tctatctgagtccttcttgctgcagagaaagccttcctgtgacctcatcctttcccctaaatgttgggaaatgctcctgagtcctgtccttgacacatacatcttccttgggttgagggatggggactgggacacatgctttgggaagggcaggtgcagagtgatggggctgacggggtgggggaagcagggggaggagctgtccctctgaggcctttgggaatcggctgtgccaggcatcctcagccctccagctaagcaacacagagagccaaaagaggctactagagacaagaaggccttcatggggccactgcttgtgggggatgtcagcagtggggaggagtgaagcaggaaggaaccgggagactggatggaattgctcccttcacacggtcacacatagccacacatggtcactgggaccagagtcagctctgtctgggcagccaggccctcagtgcaagccaccagcccatctggaggggattagtgctccggccaacaaggtcagctggccccttcctagctggagcctactcaaccttgccaggaagtcagagagctggacaagtggagcccagcctggggaggtggaagagagggaggatggagcatggtgaagcacaggtggcctttttggcagccccagccctggctttggaacagtctgggcagtgtgccaacccctcttgccactgtcgtcccattgaccctcatgaatgagttgcgaggcagttaccttcagcctcctatggataaatattcgaggcccagagagggtaagagacctgcctgcgacccctcagcacttctgtttctctctggggtcttgagggtacaataaagacccctaaggcttcctcttctcgcaggaggtccaggcgcagctgtgggggagggtgcccttggtgtcttctgtccctgcagccagtctgctttctactcggcagctcctctctccctcctgggatgagatgtgcacgcgatgatgggattctgtaaatgggttgggaagaaggagttacctccttaaagggttagttctcccaggagtgctcgaatttctaaagggggcagggtcccacataaatctcactcagaagcaggattataagagttcctgcagcatcccttcccctttgctggtccctcttgagtgtgcaccctgttctaccagcggaacacctgcgggccagggtcactggagacagggccataccgtctgggcggtcacttaagtaacttcatcattctgagcaccccccttccttatctgaaaggtggggggccatccacccagctctcagggctgttaaggtgactaaatgggataatggttgtatcatccctgagcaaagggtatcacagatgggaagattatcttagctccgcagggagccagatgggctgtgagggaggggtaaaggcagggctggagggggctggaggggctggctgagcagggtatatatggggggggttcttcctcaaacccagaaaaactcttagttaggcttagtgtctttgttgagaaactgaggcccaaagaaaggaatttcttgtccctttgtttccctttccctgcctgaggtcattcattcacctaacaactttgtgcccgacactagacaaggccctagtgagcaaaatgaacatagcccctctgggaacacagagcctagatagggagatgatcatttcattactgcaaacacaaacatataatcccagcctgggctaagtgctgtgaagttccagacttgtgtctggctcggtgctgtatcctaagcaccttggcacttaagtggcattgaaatacttgctggaaagaaggccactctgaggaggtgatgtcagagctgaggcttggagggctggagttaaataaagatggtttcaggtcttctttgccttccctgtaggttctgcctctgcctcctctctggcactcaggctaagggtaagcatctccgactggccatcagccccaacatgccgagtacagggatcagatcctgtcttgcgtggccggtctcccctaggtcctgaacccagggaagtgcatgtggatctcaatttatctagatggtgcgtttgtgcctgccctcctttcgggcatgttctagaacagagttcagtccagagcccaggggtggccgggatgatggatgagggtgtggggcctgctgaccaccaggggacctgatcattgggctgggccagcctctctgtcctcattttcccctctgcaaagaaggggtgttgggcgtccctacttctcgcgccagccccggggcctctatcctggcgggaagggcaggccgacccggcagactgcggcctctcgggagggaagaaggtgtcagacgcgcggagcaaccataaatagcccccctttcccagaagacggcacggggttcaagactcaggcgccgcatactcagaatgagagcagagactcccgccaggaaaaaaaggcacttaggggatctgctcattagcatgaaatgcaaatgagcccgcccggcctcatttacacaactctgtgcatggattcggcgaaagggcaaccagggagacgacggcgcagcagccactctgccacttcccccatcccctccccccatcggccggggcgggaactgagacgaccccaaccctctgcggtggcgggaggtgcgcgggggctgcgtgggtggtgcagccttaggagagtgaacaacgcccaggggtgatggcctcagcaaagtgaggggtggtgatggaggtcatccgacccatcccgccgcctctccgcagtggcgcaagcgccccaaaatctccggagagggaactgactgacccactaggttccgccgtgtctacctctcgcagatgttggggaagtgcttcccggcgtctaatcctcgctgttcccccctccaccggcgcccagcacacccgcggcgctccgctcccgggtacccacagctttctggagtggcgccggcggcaggagagagctagagccgactgagccccagaactcggggaggtaggcggggcaagggccggggtctgcgcgtgcgtgtgcacgcgtggaaagcacaaacccacgagggcccgctgccggtagggttaaggtgagtgagtgaaggcggcagacccgcgaagttccagttccgcggacactccttccctaagccacatagggacttaagagaaactgaggcacgaagttggggggtggcggtggtggggactttgaaggtcgagtcgataaagcccagctctgtgcttccgccccctcccacacactcgagacccccacaggttccttcttaggggtcctcgctctgctccgcagcccctcctggggatccgggctctgcggtccagcgcgacctgcctggggccacgtgttcaagcacgaagcccctgcgtggagtccacgcccttcaaaaggtccctaggggcaaagggatgaagcccaggagcgtcaatgtgaggtcaggtccagcgggttagggttacgaggtcagggtcgaagtctcagaattgactcgggagtatgaccaataagcccaagagatttgtggaggccacgcccagaccatgcctaccctagcctttctcgagctccgcccgtttctccaagactgggcccctccagcctgaagccccacccccaggacatccagctccgctccttcccttccccagtcccgcagccaagctcaactccagggtgggagattaaccaggtggagacctgggatttcgctctgggaccccctggtgacaaccctcacccccgtgccgcctgtctcctttcttccccaggcccgcccagagctgagctccgtcctccggctgctgcccaaatcaggggtcgtggacaaaggatgcctggggcctgcggccctacgccaggaccccgcgccgaatactctgattcttcgggctccctccaagggagtcccaaagaccccaatggccaataggaaagtgggttcggtctgggcagcagtctgattggctccagccttcgggagcggacccaggggcaaggggaggggagaggggcggtcctgggttttggggtgggaatcggattccagctgtggttctctccctgcgctcccgcccgcactgccacggcggacggccaatgggcgcgcggctcggggccggcggcgtccggcgattggctgcggggctgtctgggggcggggccgaggcttgaagttgaagtgagggatccagctgtggtgtgcgcggggctcctcgccgccgctttcgctcgctcgctccgcgtctcggccggaggaggaggctgtggcgccggcgacagctacggcagcggcagccaccgcggcggctgcggcggcggcatctccgcctccactcccgcccgggactgccccccactgtctccccgcccctcccggacagtgagcccgcggcggggcgggggaaggagccgcccccaccccctccaagcccacccctaaagagatccctcctcccctcccccgccgcctggcgcggagccgggacgatgctgaccccttagatccggctccagctgcgccgcgggaagagggggcgcccctccccggacccccgccctccgccgctgccccccttttcgttcgccctctcggggcggcttcgccgaaggtagcgccgaatccggcaaccggagcctgggcgcgaagcgaagaagccggaacaaagtgagggggagccggccggctggcccgggaagccccaggggcgcaggggaagcgggactcgcgccgggcggggtttccctgcgccccggcgccccgcgggcagcatgcccctgcgggcagggggagctgggctgaactggccctcccgggggctcagcttgcgccctagagcccaccagatgtgcccccgccggggcccccgggttgcgtgaggacacctcctctgaggggcgccgcttgcccctctccggatcgcccggggccccggctggccagaggatggacgaggaggaggatggagcgggcgccgaggagtcgggacagccccggagcttcatgcggctcaacgacctgtcgggggccgggggcggccggggccggggtcagcagaaaaggacccgggcagcgcggactccgaggcggaggggctgccgtacccggcgctggccccggtggttttcttctacttgagccaggacagccgcccgcggagctggtgtctccgcacggtctgtaacccatatccttcggggcacgacggccaggcgcggggtcagaagggggacgggccgcaccgccgggggtcgggggggaagaagacccaccgccaggtgagtcgaagtgagcccggagggtaggcggatggggggggggctgccagggaggggagggggcaccagagtgggagcggagacgcgagcaggtctcgtcggtaacccgggcttaccccacctgcgtacacacacctcagtcttcctgggttgggggggtggggatccaggccaggagaagagagctgtgccccgctggctcgcagctggacgccctccagatgtggtcaggggagggtcgtcatcctccagatgtgggaagcttcgggagcctgggagctgtactctgcccgcgccggttagcgagctgggtttggtttccgagtttggtggggggtgggtgggggcggtggggaggaagctgcggggacggaggaggggggaccgcaatctcctgggtttccctccttcccccgccccaaagtttgcggcggattctagggtctgatcccccaacctggtccttgaggctgaggtttttactgacctagaaggagatgttggggggcggggaccaggtcctggcccacctcaccccccacctcgcgggttggaggcacaacaaggagattccggcggcggctgatgtcaggggcgcagaatgagaacaagatgtggtggaggggagctgtctgcccccggagctgggagtggagcccctttccgctagagcccagtgccgcgggtgcctcctacccgatctccattcgatgcagggtgcttaagattgggttggggagttttatgctggatttttcttgtggagggaaagactgtgtcaagagcttttttagcaagtgggggatggggttaagctggtccaggttactcctcccctttcacaaataaagagtgctcctgcagaccaggtatgggggactgcaggcccgcgaaagtcttgaggggacagtaatactgtcagtgtgttcactaaggaggactcgggtccaccaccccagcgtagactccgcagataggtttggggaatgcaagccccacattccagggagatggatttagcactgctccctgtctgcccaggctggagtggtaggggagaccccagcccagtcagaccctagctcaaagcgccacttgacagacgcctggccccaagctccctggcgggtcctgccaccgggggaaggaaaggtggaggggaggtgttgctgccatctcaggtctggacagcttctctgggctccttccttccagctcagaggttcttatagacccagggtgggagaccccaggtctcccttgtagcccctgtgagcctagcagggactctgctttggggaaggggggtggaaggttggtgccgccctcactctctgcagctctgctgcctctagtgcgcaaagcagggatgagcttgtggcccccccacccccatcctctacaccttgtgggtctttaggaagctcccctcatcacatcctcttctcatccactgccccttcttcctttctctctgagctgcagaaagagaggtgcaggcctcagaggtctgtgttcttgctgaataggcacaatcttgaggtttgagcccccagccccaggcccctttctcccaggcagggatggagatggagaactgatatggctggaaaggatgggttccgagcaactctcctctctgcccctaatcatttaccccttccacgaatgggaaaaagcatcaacctctatgtcctccttctcaagggtcccaggggaggtagagagagctcttctctcccctctccctgaaaacagacctctaggctagcatctcttctcgcctgccctatctccaggtgctagtggagggtctggaggcagactccttcactgagtggtctggacgggggcaagtgttgaggcctggcatgggggaggagaggtgggaggacagcactcaccttgggagttggggagcagcttcccccaggggagtggtagttgggtgtgtggcatcagcattactaggtctggagaagcctgggttggctgaggatgggttgagaacaattttttggcaggggactgcctaagctgtgcccctcaccactgccatcctacccaagtaccaagagacacctgtatttttgctgccagaggggctctgaactgcctccagggcctccctctttctctttgtggtatctgtgactccccacaggcttcaggagggtccctgtacgcctctgagccggagggacataaggacactcccctccacccccaactaactgaagctagttaggcttttcttggtacattctgcttcttggcctctcctttttaagggaccaggtttcctagagaggagatctagacccaggtaggaagtgtgtgtgtgtgtgtgtgtgtgtgtgtgtgtgtgtgtgtgtgtgtgtgttgcaagggaggacagcaaaaggctcagaagtgcaagctttggtgtggagagcaggggtactggcagacagtcacccctgcctcagatcagaggggagcatgctggcctttccagtatgtgttcctgcaagtgtgagggagcgcgctcccctctcggggaggagttcctccgcattccctctctggctgttgtgtcacatctggaagtttgtgtaggagtttctccaagctcagagcccagcacagctttttctcatttggaaatcacaggctggcatttgggatgccgagagagggggagtgggaggggggccagagggggaagaggggagcctgccaggagtcgggggaggagaggggggggaggcctgaacggcaggagccctaatggcttccagaagtgagtgtgagtgagtgactgtgcgtcactctgtgtgtctgagtgtgtccctctagaggggtgggggcacaggagtttctggagccttccttgccacactgtcccaatgccccaagtctgcctatttctcttacctagggagaattctccatttctgtcctcagaggaaatggtggggggagtgttcttcctgtctcttcatcaattccctcctccaatttaatttccaaaccctaagctcaccagaggagattctggggagaagggctggggctggagaattgaatgggattgagggggggccagatcaccccttggcatgctttctgccccaggcccactttccttctgggtcacacacacattccttcccacccgctctgctccaccgctctgctgggggactccccatcacccgtagtgccagttggagccattcctgggattacccccaccacacagccccccccaccctcgcctgctcccgcccagcactcaccccgccctgcctgcctcagccaggatggcgacagacacaactgctcacacgcagacatgcgcacgcgcgcgcacacacacacgcacacacacacacagagtcacagacgtttgaatcagatttctggcctatttccccttccaaagattccagcgggccgtctctcttgtgtctctgtgtctcatgtctctgtctctgggtggagccggctgcctttctgtgagcttcagttttcaattcagctggaagcctctctccccctacacccatgcactgaagcgtggtgaggggggaaccacagggaaataggcttgtggggtgaggggggggggttctgctgggggaatccccctttgagctttggagcagggcggagcccctacatcccatgttaccctaggggttgccgaatccgatagacaccaggagcctctctgtgggatgggtgaggcaaggacctatccccctacctcctcatttactagaaggccaggactcctgggtccaggcccattttctcctcaacgttccttagtctcacatttccaggctcctaggtgggaatggggccgctggagggcctgcttgccttctcagcccatgcccagagcccctgtgcccctagaggtgtcccagccacccccctcctctccctactttcctcacccttgcggctgccaggctaagcaagggctctatctagataaagccccacacagaggactcatttgtggagataacatgctctagttctctctcccaggagggaggaaaggaggagggatggaagtggggttcctctctctgccgtttcctttttctctgcttttgatggtgggttgtggggagaagaaagatcctcccctctcctaccccctctttgggatccactccagcccggacagtcaccatagcaacagtagacatgtgactgcacaggtctctcatagtcactatggcaaccagtgtcccccgttcccttggttaccatggggatctgtcacatggttttcccccaacctgataacctgtgggtctccctgattctcctcccctgcataaggacaagacaacagcctcagtcaggggagatcatgtgagaggggtctttttaattaccatgacaacaaatccacaccacctggtgacacatcctcctgtcgttatggcaacagaagaacatcacacagtgacatactgccatgttcccaaggaaacaagccctactctgagaagggtgaaagacccccccccccattaattattcctctattcagagtgtcccaaattgtcgtgtgccttggtctcttccctgtccgtttatgcttacgtgtcgtggaaggagagctgtacagggtgggcaggatgttacttggaagcaggctgaattgccaagggacccttaagaaggggctgacatgatcaagagctgtgcatgaggttattcgggggcaggctttgcctgtaagaggcctccagtctgagcctgggtaaggtggggacagaaagaggggcaactcctctgtgaggtcacttctgtaccttcccccagttataagcagttcacctctgtcaagggaaacaaggcaggaagacctgaatggggacacacatctggcttctaggcagggagacttattgattggttgattcgttcattcattcattcagtcttcccaggtattgatcatctgctccgtgccaggcactacagcaagctccgtaggggatctaaagacgtatcagaatgcccctgcctgtcaggagccccagctcagcaggggaggtcgacaagtgcacagattactaacacggtggaactctgccattagaggggtccaagcagatgtcctgggagcccctcttcctcagagatctactgcctccacacagagacattcactcactggggctccttccagacccccctttccctgcagaggagaggaggggacctgcatggggaaagcagaccagttcttgagggtaactgtgtctttccctttccaaatgatggctcccttcctgtccccctttttccagggtgacccctggctgaaccccattctggggagagatccactgcactccggctctactcagaaaaacaattccatggaaacagagcactttttatttcctccctgtcatctgcctacccccaaaaacctagaacttttttcttaaaccctcttattcttgtgagggggtgggggttagggaaactgcagtgcattaggactctcggggtaccacggacaggtggcgagcaggcatgtgagtctaggggagaagggcctgggtggtggagaagagacaggggagggctgtcaggggtttgagggattcatgggctatgggggagggcatgtggcttgggagtcagaacagagatgggctatggctgggaccagctgggaggaaggtccataggttcctgaacattcctgctggcctcttcatgcctggccaaagccttctcattccagaagcaagattccacctgctctgggccctacagagtctggcttggtgggtcatgccaggagctgccacaatacctcccccatccccattccccagggggtctctggtctcctttccccaatctcctgctctctgatcttttctagcctctttactcttccccacccttctcatattttccttaaagaaaataggatacttggtcatttaaccgtgagtccagtgcctggaaccttctaaggtccggaggccgttttgtacattctcctgctgatgggctggaaatgagtcactccatagaatccactgtatggaaagacccagggtttagaaagaacccctctctcctgcttgctgttttggctggtctgggctggaagccacaagcaggtgtgatggcggcaatggcctcttgggggagggggtagacattgtccactctgcacggcttgggagctatgcccagcatggtgcctgacacataatgggtcctcaatatttaaatgtgtgaatatgcctagtggtcatttgagggtgttgagaggttgggaggctggtggtggaagagggagccccgggctctggtgctgtagcaggggggactgcagctgtggacgtctgccttacacctagtgccagggcggtcatgacaggcagttctgcctgcctgagcagctatggtgtgcagaggaaactatcatatatcaggagcttggaaaccaccgtctcatcctgccttctcgggtgaccttcagcacatgacttcggcatttctgggcctcaacttcctcgagttctggggaagaaaatgatctaccccagatatttcacagggctgttgtgagcatcaactgtggcattgtgtgaaagtgcttggtaaactgtaaggcaggcataatccgactttaggtttgtataacacattcacatacagtatctcatttgcttctcacatctaccctgtgaggtagggagaataggattcagattctgcagcaaactcatggtgtctggcatttccacaggcatgatcgatttattccccaaatggcttgtgcaaatagtcagggtatttgtggcttgtcttcctttacagatgaggaagctgggtccagagaggtgagatgaccaaggtgggactccccttctctgatgaggagtctggggctgggggctggtctgcgtgtatgtcagggccctggcaccacacctgcttagcctcagatggagccaggaggtaaacgaggaggaggtgttagggcggggtcggggggccggcctcagctccagccttggccagctgtttccttgactgccagtacc

SEQ ID NO: 4 - DNA, 3720 bp, Homo Sapiens
tgcagttgtctatcaaaattttacatatactttggcacacaattacactcgttggaatttatctcacagacacattcacatttatatagtcaaggatgttgactccaacaacattggtataagtaaaaagttggaaactgcctacatgctcatggataggggataaatcgactaactcaaggtcctcccttacaatggagtactatacagccttgaaaaagaatgacaagatctttatgtcaggacatggcacaatctctaagttatttcaagtgaaaaaataataataataataatattgcagaacaatgtgtatggttggatatacataaattcttctgaaagaatacccaagaaacttaaatgtggctacctcaggagctaggaatgaggtaggtggagaggagggacttttacttttcaatttagaatataccctgttgtgctagttgactttcctcctactgttaacaagtattacagtcctttttaatttaaattatttttcctagcacaaatttaaaaaaaaaaaacttaaaatggaaaaacacacaggcgtgagcaaaagaaatgaatggcaataatctctgtggtttactgagtgcgcctggacatttatgtgctctcagtttctctccacaggaaatgcacaggtgagaaactgacgttaagggggactgagtgtcaagctagttagtggcagagggcagattcaaacccaacacggtcctcccctgctgcccctcggcctctgcctccaggtgggaagcgcatctaccggacggtcggcccggtgaggcgcagcgccccagactggcgcatccgcggccccagcgctccacgcctggggagcgcgcgcgcacgcagcggcgcgagcctggcggcggcggcgacaacaacaacgtcacagctcgagctttccttttcggagtccccggcacacatcctgtgtccatgtttgggcatttacgtcacggcggcagggccggggcctcccaaaatggcagtggcccggggagtcggaagcccggagccagcgccgccgcagctatataagtgggggggctgtgggctgggggagcccggcagcgctttggagaggcgaggagccgccgcccgaggccggtgcgggcgagcgagggcgccgcggctccccgactcctttcccagaggtgagtgcccgaagccaggagcccggcgcccataggtctgtgcgctgcggggaacccctaccgccagcctccccgccacccgcgcgcccccaagcccagcgggcgaggccccgggcgccccacagccggcgccgcgccatgctccaccttagcgagttttccgaacccgacgcgctcctcgtcaagtccactgaaggctgttgcgccgaacccagcgctgaattgccccggctgcctgccagggacgctcccgcggccaccggctaccctggaggtaaggagggcgagcaggggtgctcagacgacgacggcgcagcgcgggggcgcaccatacctgagaaccaggagggactgggacattggagctatgagaataggggcgatgggaagcttaggagtcctggggtgcgcacccccattcccacccacactgggccgccagcgcctccgcaggaacctgtgcggttatcggagcgcccttttgcctgtgcacgtgtgttttgcgtgtgcatgtttctatgtgctccttgggacgtatgcgggcccctgctgaatcagaatgtgcaaaaggcactttgtgtatatccgtgggcaccaagagttttgtaggtaggggctgtggactcaggtgcaccctttgatgtgcccagagctgattcctgctccctcctcagcaggcgacttcttgagctgggctttgaacagctgcggcgcaagtggggacttagccgactcctgcttcctggaggggcctgcgcccacaccccctcccggcctcagctacagcggtagcttcttcattcaggcagtgcccgaacacccgcacgacccggaggcactcttcaacctcatgtcgggcgtcttaggcctggcacccttccccggtccagaggcagcagcgtccagatccccgctggatgccccttttcctgcggggtccgatgccttgctgccgggtccgccggacctttactccccggatctgggcgctgcccctttcccagaggcgttctgggaggcctcgccttgcgcgggtgccccctcgcagtgcctgtatgagcctcagctctccccgcccgacgtcaagcccggcctccggcggcctcccgcctcgccagcgctggacgctgtctctgccttcaagggtccctacgcgccctgggagctgctttctgtgggggccccagggaactgtgggtcacagggagactaccaggccgccccggaggctcgttttcccgtaatagggaccaagattgaggacttgctgtccatcagctgccctgcggaactgccggccgtcccagccaacagactctatcccagcggggcctatgacgctttcccgctggccccgggtgacttaggggagggggctgagggcctccctgggctcctgacccctcctagtggggagggagggagtagcggcgacggcggagagtttctggccagtacgcagcctcagctttccccgctgggccttcgcagcgccgccgcggcggacttccctaaacctctggtggcggacatccctggaagcagtggcgtggctgcaccacccgtgccgccgccgccgcccacccctttcccccaggccaaggcgcgacgcaaggggcgccgcggcggcaaatgcagcacgcgctgcttctgcccgcggccgcacgccaaggccttcgcttgcccggtggagagttgtgtgcggagctttgcgcgctccgacgagctcaatcgccacctgcgcatccacacgggccacaaacccttccagtgccgcatctgcctccgcaacttcagccgcagcgaccacctcaccagccacgtgcgcacccacaccggcgagaagccttttgcttgcgacgtgtgcggccgccgcttcgcgcgcagcgatgagaagaaacggcacagcaaggtgcacctcaagcagaaggcgcgcgccgaggagcggctcaagggcctcggcttttactcgctgggcctctccttcgcttctctctgagcaagagatgggtttatgggttggggcgccgccgttcggcgcgcacgagttccgggccgttcccctccccgctcttcttccaactcctcctcgcacgcccgagggccggcctccgtcccgcttccagtttccttgaagcgcccgccgcacacgccctattcagcaccagctcgccggacagttcccgcggtccaggcgctgtcacccttgtcagccgcgctttgggggaagtcttctgagaccacccagtgaataggcactaccctgggattcaagacagtcttttgtaactgcacacgccccacgccttcctctataacccccagagacaggctggggcaggccaaggcggtctcgcgcgggactttgtacagcagtgtcttatccagcagccgattggatgtaacgttttgctttgggttttttttccttttgttgttgttaatttttgtaaagcagacgctactctcaagcagttgacaaaactgtttatttttgcaattaaaattattgtgctaaaagcttactgaatctgccatgtaagctcct

SEQ ID NO: 5 - DNA, 8759 bp, Homo Sapiens
tagcctggaagagggcagccaggggagaagttagggctggagctatgagaaaggataagatgagatgatggcttcaacattgaggacagaaagaatattgagatgagaaagtagtccattataagcatctatgcaaaggaaatagcagatgtccacaaatcagcagaggcaacaactctgaaagtttattcataagcccctcttttcatctccaatccagttcaaatgtaattatttaaattgttcttcactctccttcctggatcatgaatgagctccttaaatgcagggtccacagtgtcctattcatcagtgaattccaagtgcctagcacagagcctggcaaatagtaaatgcttaacaaatattcgttcagtgcatgaattggagtgattctctactttgctcataagttgaaaaaaggtttattacatacctaaatatgctgaaatcacagggcatttggcaaccccccaaaaccaaaactcccagtttggaaacagaattttaattctgtgaaaataaaatccattcatttattcaaaaaatatttattaaacaatgaccatgtcccacaccaggctgagtcctaaggattcaatgatgaacaaaaaccaacatgattcctgctcttaggaaacatacagttcagtgaggaaaacagattgtgagaagtcctccaacaaatactgggtgctattaaaatatattaaaaggtgagtgggtgagggacttgagctagcctaggtggttcaggaagtcttcctggatgtgctgatatgcataggcattaactagataaatagagagaaggatgaaccaacattgcaggtagagggaacagaatatgcaaaggcaggaaggattatggagtcgttggaggacctgaataaaggccagtgtaagtggatctcagaaaacaggaggaaaggtgtatgagatgagatcagagaggcagatcatgtggggtatggttaatgttttggacttttctattaagagcaatggggagacagtgacaggacttaaacggggaaataatatgaccagattaaactttctaaaaaaccctctatgcaaatatatattgagagttaattattgacaaagattcaaaggcaacaaagtggagagagaatagtattttcaaaaaatggtgccaaaacaataggacatctatattaaaagttgggtatctgtctacaaaacttaattcaaaatggatcacagacctaaatgtaaaactgaaagctatacaacttctggaagaaaacacagatgggaatctgtgtgatcttgagtttgaaaatgatttattatatctgacaccataatccgtaagttaacataattcataagtgaacaaagtgatgaactggacttcatcagaatttaaaatgtttgtgcttcaaaagacactggtatgataatgaagacaaactacagataagatattgttgaatcatatttctgataaaggaattgtgctcagaatacataactctaaaacccccataataaattacaagtagcccaattaaaaaaaaaaaaagagaaaaaatttacagtcttcatcaaagaaagtatacaattgtaaaataagcacatgaaaaatgctctgcatctttattcatgggagaaataaaaattaaatgggaaagacacctctaattagaatactaaaattaaaaagactgaccataccaagtattggtgaagtggaaatgtaaaatgatacaatcacttaggaagatgatttggaagtttcttacaaaagtaggtgtatacctaccctgtgactcacccattccatggctaagtatttacctgagagaaatgaaagaatacatccatacaaagatgtttatacaaatatttatagcagttttatttgtagtagccccaaactgaaaagaacccaaatgtccatcaaaagtgaatggataaacaaagcgtggtacagcaatgcaatagaatactacttagcaataaagaagaatgagctagtgatatacataacagcttaaatgtacatcaaaggcattgtgctcagtgaaagatgcaagtaaaaaaaaaaaagagtacatgctgtatagttccattgacataaaactctggaaagtgaaaaacagtctatactgacagaaagcagatcattggttgcctgaggaggaggagtataggagaggtggagggaaaatgtacaaagtggcacaataaaaacttttggaatcatagatatattcactatcttgattgagtgatgatttcatgagtgcacgcgtgtgtcaaaaatgatcaatttatgcaactttaaatatgtgcagtttattgtatatatcaattatacctcagtacggctattaaaaagaaaccctctggctgcacaatgcagaactgattctaggaaagagtggagggaggatgaccatttacagtgctccaggtggaagagaacggtgccttctggaagtgaactaggttggcaacaacagagatgaaataaatgggcagatgtgtgagatacttaggaaataaaacccgatggtcaccattttccaaaggtcagctcatcctggctttccagagcaaagagctagggaagactttattaataaatccctcttgaagttgcagaggaagcttatagcagaaacttactctcaacctgactaatctgagagaacacctctggttccatttgattactaaaaaactgcaaagaacaggaggagaaagaagaagaaagctggtacaaacagtgaacttatataatattaatcaataattgtctcttgttcttaaaagcaatgggaagaaaatgagatttgagctggaagatcagagttcaaaatccaaataaagtatatggccctaatatgcttatagtagttaacctttcctgataatgatataattgttgacagcaccatctttaaaaataaaaataacatagtaatccttcagatttgtagaatgctttcctgtttacaagtttgttctatacacattatgtcttttaaatgacacactagccttctgagggtaacttatattggcaacagttttcagatgtggaaactgtgaagacaatgttggtgatgtggaagcaacataaactttggagtctttcagacccaggtttgaatgtcagactgctttttattcagagtaacttcagagcattatttctcaccttaattttttttcaggcctctttgtgtctatgtgtcctcttcactcctgtccattgttcattcagtgatttttgcaccttccttcactgttagtgtgtagacacatagttctcctggctctgagacctatgttaattccattctaccatcctgccagcccactcaattcctattgagcaatgctagttgaaagttgtggtgggattaaatgttgcaatgagtattcaaatgaggttgaagtatctacgcattctacttacatatggtgaggtatattcaaggaaggctgtagccattaaaatctcaggaaataatttttcacctcctcaggtgaaagggtcttcaggcctttgtgttctggaaggttcatttatagccatttcccaaatgacaatgcgattgatgagtctagagtctagctcaaatagcaatggactggaagactagtttaggttttactaatgtggaacatagaacaaattatgtccttgtttcagcctgttcatctgtgaaatagagcctatcatatccagtcttccttgcctttaggtttgagttaccttctttggtcaaggtaagtaaatgcctatgatgtttggctgtgcacaagataaagctacaacaaagctacaacccatcttttctctgtagaagactgcaaaaagcaaaagagacccaggcaaaaatctcggaatgacttttggaacagagagcctccccagaatcagaagtcaaaggaatttaaaacatagggaggcccagggtctctactgacataaaggaaagatgttttccttataggtttacgtttacattttctctctctttccattcccacttgcatctccacctttacacagggcttatgggacctcctccacaaaagagcagttgcagtaacccacatcatcctctacgcctggctgtccatcaagaggcgaaaagcagccctatataggttctatccttggatagttccagttgtaaagtttaaaatatgcgaaggcaacttggaaaagcaagcggctgcatacaaagcaaacgtttacagagctctggacaaaattgagcgcctatgtgtacatggcaagtgtttttagtgtttgtgtgtttacctgcttgtctgggtgattttgcctttgagagtctggatgagaaatgcatggttaaaggcaattccagacaggaagaaaggcagagaagagggtagaaatgacctctgattcttggggctgagggttcctagagcaaatggcacaatgccacgaggcccgatctatccctatgacggaatctaaggtttcagcaagtatctgctggcttggtcatggcttgctcctcagtttgtaggagactctcccactctcccatctgcgcgctcttatcagtcctgaaaagaacccctggcagccaggagcaggtattcctatcgtccttttcctccctccctcgcctccaccctgttggttttttagattgggctttggaaccaaatttggtgagtgctggcctccaggaaatctggagccctggcgcctaaaccttggtttaggaaagcaggagctattcaggaagcaggggtcctccagggctagagctagcctctcctgccctcgcccacgctgcgccagcacttgtttctccaaagccactaggcaggcgttagcgcgcggtgaggggaggggagaaaaggaaaggggaggggagggaaaaggaggtgggaaggcaaggaggccggcccggtgggggcgggacccgactcgcaaactgttgcatttgctctccacctcccagcgccccctccgagatcccggggagccagcttgctgggagagcgggacggtccggagcaagcccagaggcagaggaggcgacagagggaaaaagggccgagctagccgctccagtgctgtacaggagccgaagggacgcaccacgccagccccagcccggctccagcgacagccaacgcctcttgcagcgcggcggcttcgaagccgccgcccggagctgccctttcctcttcggtgaagtttttaaaagctgctaaagactcggaggaagcaaggaaagtgcctggtaggactgacggctgcctttgtcctcctcctctccaccccgcctccccccaccctgccttccccccctcccccgtcttctctcccgcagctgcctcagtcggctactctcagccaacccccctcaccacccttctccccacccgcccccccgcccccgtcggcccagcgctgccagcccgagtttgcagagaggtaactccctttggctgcgagcgggcgagctagctgcacattgcaaagaaggctcttaggagccaggcgactggggagcggcttcagcactgcagccacgacccgcctggttaggctgcacgcggagagaaccctctgttttcccccactctctctccacctcctcctgccttccccaccccgagtgcggagccagagatcaaaagatgaaaaggcagtcaggtcttcagtagccaaaaaacaaaacaaacaaaaacaaaaaagccgaaataaaagaaaaagataataactcagttcttatttgcacctacttcagtggacactgaatttggaaggtggaggattttgtttttttcttttaagatctgggcatcttttgaatctacccttcaagtattaagagacagactgtgagcctagcagggcagatcttgtccaccgtgtgtcttcttctgcacgagactttgaggctgtcagagcgctttttgcgtggttgctcccgcaagtttccttctctggagcttcccgcaggtgggcagctagctgcagcgactaccgcatcatcacagcctgttgaactcttctgagcaagagaaggggaggcggggtaagggaagtaggtggaagattcagccaagctcaaggatggaagtgcagttagggctgggaagggtctaccctcggccgccgtccaagacctaccgaggagctttccagaatctgttccagagcgtgcgcgaagtgatccagaacccgggccccaggcacccagaggccgcgagcgcagcacctcccggcgccagtttgctgctgctgcagcagcagcagcagcagcagcagcagcagcagcagcagcagcagcagcagcagcagcagcagcagcaagagactagccccaggcagcagcagcagcagcagggtgaggatggttctccccaagcccatcgtagaggccccacaggctacctggtcctggatgaggaacagcaaccttcacagccgcagtcggccctggagtgccaccccgagagaggttgcgtcccagagcctggagccgccgtggccgccagcaaggggctgccgcagcagctgccagcacctccggacgaggatgactcagctgccccatccacgttgtccctgctgggccccactttccccggcttaagcagctgctccgctgaccttaaagacatcctgagcgaggccagcaccatgcaactccttcagcaacagcagcaggaagcagtatccgaaggcagcagcagcgggagagcgagggaggcctcgggggctcccacttcctccaaggacaattacttagggggcacttcgaccatttctgacaacgccaaggagttgtgtaaggcagtgtcggtgtccatgggcctgggtgtggaggcgttggagcatctgagtccaggggaacagcttcggggggattgcatgtacgccccacttttgggagttccacccgctgtgcgtcccactccttgtgccccattggccgaatgcaaaggttctctgctagacgacagcgcaggcaagagcactgaagatactgctgagtattcccctttcaagggaggttacaccaaagggctagaaggcgagagcctaggctgctctggcagcgctgcagcagggagctccgggacacttgaactgccgtctaccctgtctctctacaagtccggagcactggacgaggcagctgcgtaccagagtcgcgactactacaactttccactggctctggccggaccgccgccccctccgccgcctccccatccccacgctcgcatcaagctggagaacccgctggactacggcagcgcctgggcggctgcggcggcgcagtgccgctatggggacctggcgagcctgcatggcgcgggtgcagcgggacccggttctgggtcaccctcagccgccgcttcctcatcctggcacactctcttcacagccgaagaaggccagttgtatggaccgtgtggtggtggtgggggtggtggcggcggcggcggcggcggcggcggcggcggcggcggcggcggcggcggcgaggcgggagctgtagccccctacggctacactcggccccctcaggggctggcgggccaggaaagcgacttcaccgcacctgatgtgtggtaccctggcggcatggtgagcagagtgccctatcccagtcccacttgtgtcaaaagcgaaatgggcccctggatggatagctactccggaccttacggggacatgcggtaagtttttccttccagaaatgtcgcctttcggcccagggcagagtcactctgtgttctggggtatctagcggctcctacctgcgcgaacactcagattgcccctgggagagctcagcagggtaaacctagagctctcccgtggactcccggcctgccagaggtttaacctgagctctcctaatttctgctgcgtgccctgggtgctgattcctgccctcccagattcttcaactcccccaaccgccccaaattctcactacctcctggtactcgaggtcccaaacagaaatcctattgcacgggccaccttcagagataaagctcccaagccctccactcttcctttcctcctgtcctcaaagtctgagaacctcaacaggaatttgggcaatttctcctcttcaggtctgttaggatttcactttcagcctgcgcagattagagtcaaaaagaccggcccaatagcttctcagcgggtatcctccagagaggtaaagtgaaattctcggttagggaaagaaagtggtctctgggtgctgaggtctgctgtgtgaaagggtgaacttctttctcctgaagcaactggggacttgctccagggctggaggtcagtagagataatccaaaccgtcatgtttagagtaggcagaggggcaactttcttggtaaagacttcacaggatttgcactcacagtttctcaacgttggttgactatgttgaaagtagttgcttgggtcggttttctcttgtaaagtgtttattttctctgtggattataacagatccacagccccctacttcaggtttgcatcagatctataaagaggagaatattcttttaatgtacaatttaattaggcttgactctgacttacaaaactgttggaaaacatttttttgtaaagcatttcctgctatttcagtgtgctccaaaatctccactggggagggtggagtgaggttttttattatattcctttatttttaggacatgtttgcattttagaatatgtgcagttagct

SEQ ID NO: 6 - DNA, 8404 bp, Homo Sapiens
aggaagctaaaaaccttgaaaaaaggttagaggaattgctacctaaaataagcagtttagagaagaacataaatgacctgatggagctgaaaaacacagcacaagaacttcgtgaagcatacacaagtatcaacagccaaagcagaagaaaggatatcagagattgaagatcacctttatgaaataaagtgtgaagacaagattagaggaaaaagaatgaaaagaaacgaacaaagcctccaagaaataggggactatgtgaaaagaccaaacctatgtttgattgtccctgtacctgaaagtgacagggagaattgaaccaagttggaaaacactcttcaggatattatccaggagaatttccccaacctagcacgacaggccaacattccaattcaggaaatacagagaacaccacaaagatactcctcaagaagagcaaccccaagacacataatcgtcagattcaccaaggttgaaatgaagccaaaaatgttaaaagcagccagagagaaagtcgggttacctacaaagggaagcccatcagactaatagtggatctctctgcaaaaaccctacaggccataaaagatgggggccaatattcaacattcttaaagaaaggaattttcaacccagaattttgtatccagccaaactaagctttataagtgaatgataaataaaatccttcacagataagcaaatgttgagagattttgtcaccaccaggcctgcattacaagagctcctgaaggaagcactaaatatggaaaggaaaaattggtcccagccactgcaaaaacataccaaattgtaaagaccattgacactatgaagaaactaatgggcatcaactaatgggcaaactaactggctagcatcataatgacaggatcagattcacatataacaatattaaccttaaaagtaaacgggctaagtgccacaattaaaagacacagactggcaagttggataaagagtcaagacccatcagtgtgctgtattcagcagactcatctcacatgcaaagacacgtgctctaaataagggaatggaggaagatttaccacagcaatggaaagcaaaaaaaaaaaaaagcaggggatgcaatcctagtctctgataaaacagactttaaaccaacgtagatcagaaaaagacaagaagggcattacatgatggtatagggatcaatgcaacatgaagagctacctatcctaagtatgtatgcacccaatacaggagctaccagattcataaagcgagtccttggagaggaagaaagagacttagactcccacgcaataatagtgggagactttaacaccccgctgtcaatatttgacagatcaatgagacagagtaattaacaaggataatcaggacttcaagtcagttttgcaccattcagactaaatagacatattcaatatatatatatatatatatatatatatatatattttttgagatggggtcttgctcttgtcgcataggctgaagtgcagtggcatgatctcagctcactgcaacctctgcctcctgggttcaagtgattctcctgcctcagcctccagagtagctgggattacaggcacctgccaccacactcagctaatttcgtatttttggtagagatgtggtttcaccatgtttgccagcctggtctcaaactcctgacctcaggtgatccacccgccttggcctcccaaactgctgggattacaggcgtgagccaccgtacctggtctagactctgccgaaattctaatacttctttggtaatgcaacagaaaactaaagattttgatggtgaactcaattgcttctgagttgtgtggatgaaaatatattttattattttttccttcaacttttaagctcccaggtatatgtgtaggatgtgcaggtttgttacacaggtaaatgtgtgctatggtggtgtgctgcacagatcaacccatcaccatggtattaagcccagcatccattagctctcctgatgctctccctctccccacccttccccgctacaggccccagtgtgtgttgttccccttcctgggtctattttatggtatgtatgtgtgtatgtgtgtgtgtgtgtgtgtgtgtgtgtgtgtgtgtgtatctatttatgtgtatatattatgatatatacaccacacttttttcaaactattattttaggtttagggatacatgtgcaagtttgttatataggtaaactgtgtgtctctggggtttggtgtgtacagattttttcaccacccaggtaacaagtgtagtacctgataggtagttttttgatcttctgtcctctcaccctacaccctcaagtaatcccccagtgtgtgttgttcccctcttcatgtccatgtgttctcattgtttagctcccacttataagtgagaacatgcagtgtttggttttctgttcctgcgttagtttgctgaggataaaggcttctggctccatccatgttcctgcaaaggacatgatctcattcctttttatggctgcaggaaaatatattttacatactagtgaacatagttaaattaatccatggtcaagacatatattcttttgtaaattgagaaatctctttatcataattgtaatatggtaataaataaatctagattacataaatgtaatctagatgttgataaactggttttaaataaagcaagtgatatctacgtatgaagagagtttacttcagttcctagaactttccttcactttcctgccatccctacttttagtaagcaagcatttactgtgtgtgtaacactgtgctaggtactaaggcaatgatgatacccaagatttggtctctatcctgaagataagcacaggagaaacattatcagtcatgatgctttctgttgcaaacaagtgaaaacctcagctcagcttaggtcagctccagggctggccaaatcagaggctcatttataacactgaggatccagattcttttgaaattcctcctgcaccaatatcagcatttctaccttctctgtagggtggcttgcctcacgttacaatggctgcagcaatcagaagtgtcacatcctcagtaatacttaatattattactattatttaataatatttagaactgtgccatccctgtttcaatttatcaggctcccagcagactactccttatctttcaaatgtcaaaactgcatcctgagctcttgcctaaactaatctggggtgaggtgaatggaagtagcactttaattgtattcattctttgtagctggacctgggcctgggctatctcctgacatttgcccacaagaaagatttctgaagttaggtaggaatggctgttgagtaggccagtgcttgccaaacctttacacatcctcacatatgtcataatatgcagataaaaagataatcccttatacaacttgctgggataaactcaggaggcttacagcatgacctgcttgaaggttcttcctgccttagaccttgctcagctgctccaggatgaggggatttacatcacagcacaactgtattttattcacagcataaaccatctctttccttctcagttgacgagttcagatgggcaataacagtgtctgccaaagagaaaaaaaaatgtattcaaactagataatctattggtacaaataccgagacacagaagtgataacagctttaagccaatgtttgatggtggtagtcccagcaagctcttttctgatgtctttgtgcctttgcacatgctccttctctgtcactgttttcttcatcaaacataatataatggacaagtggaatcaaatagaattgagttcaaattctctgctacccatcggccctggtattggacaaattaactcctctgagcctgtttcctcatctgcaacgtagactagctaatactacccattggaaagcgttgtttcttagctaatgcatgcaaggcttaaaacctagatgacgggttgataggtgcagcaaacctccatggcatacgtatgcctatgtaacaaacctacacgttctgcacttgtatcccggaacttaaagtaaaaaaaaaaaaaaaaaaaaaaagaaagaaagaaaaagaaaaaaaaggctgtttctggggattaaataagacaattatgtaaggtggccagcacagttcctggtacatagtaaatgtcaggcctgcctgacagacttctattcagcagctactgctcccctgaaaatcttcctcagacgtttccacggtgcttcccgttcttacaccactacaatcctttattacactactatccgttcattccccacagctccctcccttcctttccctaaccagtgatcccaaaaggccagcaagtgtctaacattttctatcttctaagtgactggtaaagttccgcacctatcagcgctccaagtttgtttttgttttggccgactttgcaaaacggattgggcgggatgagaggtggggggcgccgccaaggagggagagtggcgctcccgccgagggtgcactagccagatattccctgcggggcccgagagtcttccctatcagaccccgggatagggatgaggcccacagtcacccaccagactctttgtatagccccgttaagtgcaccccggcctggagggggtggttctgggtagaagcacgtccgggccgcgccggatgcctcctggaaggcgcctggacccacgccaggtttcccagtttaattcctcatgacttagcgtcccagcccgcgcaccgaccagcgccccagttccccacagacgccggcgggcccgggagcctcgcggacgtgacgccgcgggcggaagtgacgttttcccgcggttggacgcggcgctcagttgccgggcgggggagggcgcgtccggtttttctcaggggacgttgaaattatttttgtaacgggagtcgggagaggacggggcgtgccccgacgtgcgcgcgcgtcgtcctccccggcgctcctccacagctcgctggctcccgccgcggaaaggcgtcatgccgcccaaaaccccccgaaaaacggccgccaccgccgccgctgccgccgcggaacccccggcaccgccgccgccgccccctcctgaggaggacccagagcaggacagcggcccggaggacctgcctctcgtcaggtgagcgagcagagccgccgtcgcctcacgcgggaagggcgccccgggtgtgcgtagggcgggcgcaaggcggctcggcggggacccgtcctcgccaggggccgggtcccggcgggaggaggcgccctccctgccccccgccacggcggagcgtctgcagaatggtgacaggattctgggttcttgggcgaggggtctcggcttcaacttgacaggtgtcgggcgggtggggctagggtcctgagcgaagtgacaggtgcagttccctcttgtgaggctcggaggcagagggtcgttgcgagcgtccatcagacgcaaaaaatgaaaaataaaaatacaaaaatggtgtctgtgggagagtttttcaccggagaattggagtactccggtggtcgtctgactttctgttttggttcacgcgatgcaacagttgggaagtattttcttccgggcgtgcactgcatctgaagtccatttgtgggagaggccgaccagaaagccttggacaagaagcgcagggtcctgagtgtccattgcccacaggatactcggctcaggagctttgcggcgtttccttagaacaataatgcatcgaggccttggggactcaaagccatctgtagtgattgatggagcgtaactctttagaggaactgaaacatgggcaaaactttcatgagacatttaccagaagtgcttgaaagtttctaaacttttttttttcctgtttgatgaactcttcttgcgtgttagtcggcttcggcttgtctcattatttcttccattttgccttttgactttgaaccagcaaggatcttggtgtcccctctttttgcctttgtttttggcacaaaattagtggttctgtgcgcaaatggaaattttcgttttcccttattaagtggaatctaaatttaagcaagtccatacgaatgcactagatcttgaagggaagtatttattgtattacaacatcttacttttcttgatttttctactttatggttaaatagctatgattgaaagagtgtaattgtcattattgtcagcactggttctactttgagacaagttcattgcagagggaatgggacttgtttctgtttttcactattttctctcccattcttgtctatcaccaaatcctttcaccctcacccatttctttccactcggtatacactaacaattcacggcagaaaagattgaagtgggatttaggaaatggcccctggaaggctattaaaaatttatatatttaaatggactgtcttataggtcagttaaaaaccatattcgttaaaaaaccaaaataacaacaacaaaaaattaaaaaccacgtctggggcatgttctgggaaaagacatggctttagtttctgattaaattctgatgtatccaattcttgcaaatttcccttgggaaaatgcagtaatggctactctaaagaattccatgttatgcacacagctttggaagcatactctaatgtagggtaaccaggaatattgacgttgtggccactgcttggaaaaaagaggactgtttctttcattttttaactcattttatatattttaagtaatggaactataaaaaattctcttataagtcaaaaccatacaagatacagtctgttcttgattatccatacccacaaagggtttcattaacatagacagttgaactctataaattaaccagcaagggtagaaccactgccgtgcagtctgatactgagcatcttgcctggagatggaatcaaggctcagtccaactgcacctccagtgacagattccattcctgatttgagagtttagatcttatttctgttgccttatctctggcctaagtaatgtagctggaagggaaactgtcactaggaacagcataccacattcattgttgaaataatcaaaggttaatcatgtttcgagctgggtgtgatggcgcgtacctgtagtccatgctactcaggaggctgaggcaggaggatcacatgagcttgggagttggaggccagcctgggcaacaacgcaagaccccagtctttaaaaaaacaaaaaagctgaccaggcatgttggctcacgctgtaatgccagcactttgggaggccaagatgggaagattgcttgaggccaggagtttgagaggagcctgggcaacaaaacaagaccctgtctctaaaacaaattttaaaaaattagccagtggctgtggcacacctgtaggctcatctactcaggaggctgaggtgggaggatccttgagcccaggagtttgagactgcagtgagccatgatttcaccactgcaccccagcctggatgacagagtgaaaccctatttcaaaacaagaaaaaaaaacaaaaactaattatgttttgaaggaggaattggcagtctagaatagtggtcaagggcatggattatagagttagactgttgggctcacatagtggtttacctcttaccggctgagacctcaggtaagttctttaacttctccaatttgacagacatctgtaaatgtctacttttacagatgagaatacttatctaaaagggctgatgtcgggattcagtgaaaccatatgtttaaggtactttctacaggatcatagtaaatactcaaaaattattaattattcttcatactattcttattagtagataacacatagaaattagatgaatgaaaatgaattagccaacaagaatttattaaatgcttgtctttgttaaggggaaaggacaaaaataagcagtcgcatcatgtaagatgtgctagtaggtagagagatatatgaaacattgataagagaagactacagtttaacaaagtcactggcgttgaattgtataatattatctatgggtttttatctttttgttgttatctttatcctattttcccaaacagctttagctattacatttactttccttcacagaagtgttttgctgctttgaagtatatttgacttaccatgcaagcaaatatttttcactgtgtggtatccttattttggaatgaccatgaaaaagataatcatatgtttaaatttgaagtgtaatgtttttctaagataaaataagatcttaaagtatttaataatgttctttttcacagtagtgttatgtgcaaactattgaaacaagtatgtactgaatcaatttgatttataagtatatgccaattatatgattattttcatttggtagg

SEQ ID NO: 7 - DNA, 5312 bp, Homo Sapiens
gtcggcctcgggggtcgacgatcccccgggtaggcgacgtgccctgtccaggcctcacttcccgcgtccgcaaaacggggtggacaacgcagcctaaggcagagccgcgccaaggtccctcgctgtcgccgggctctggcggcctgaccgggcctggggtccgagcgtgcccccgggcctgggggggtcgccgcgatggactcgctggcagcgccccaggaccgcctggtggagcagctgctgtcgccgcggacccaggcccagaggcggctcaaggtgcgtgtgtggagagggcggaacgtgggtctgtgaccccgcgggctccgggactcggcatggggtccccgtccccgcgcgccacggcccgccagcgcctaggctcagcccttccctccgcagcggcctcgcaggtccgcggccccacggtggggcgacgtgccctgtccaggcctcacctcacgcgactccaaaacgcggcggagaatgcggccgtgggacccctccaggggccccaagggtctgcgggggctgggcgcctgggcgcgcgggcgggggaggctcggcgccgcggtctataaataggcgctgctccgccaccgccgctgccgccgcccccgcggctggatccgggccaggtggggcctcccgccccctggcactctccggaggggtgagtgtcgaggcccccagcttctccggcttatggagggccttgagtgtgtcccaggggtcccaatcctgctgccctctgcccgaggagggaggacatcgcctgtgcctgctgcggcctgacatctccccacggaataaatacagtgtcggtccctgcagagccctccctgggattggggccaggggtgccttctcctgccaccacctcgcctgccttcttatctccaggcttttgcccacgggccctccccttatttttgccaacgaaatgccccaccctgggaaccgtaccctctgctgtctcctcataccgcatttggtaagagacagggtattgggcttctggagaaacctttgtgtccctaccctgttccatcctgtccccaggacattgacaagcagtacgtgggcttcgccacactgcccaaccaggtgcaccgcaagtcggtgaagaaaggctttgacttcacactcatggtggctggtgagtgggccaggctcctcgggggagtggctggggtcactggccagccaagctctgtcgttggagccccagacctaacgcagctccttctctgtacctgtgtgcaggtgagtcaggcctggggaagtccacactggtccacagcctcttcctgacagacttgtacaaggaccggaagctgctcagtgctgagggtgagtggcccccaggaggccctggcactgatccccagtccccttccatgggacctctccaaggactccctttcaggtccagctcccactgttctgttctcgcggtgtgggtcccctgggggtagggccaaggcaccaagatggatgaggacgagggtcctggctgccaagggtgaggggctgagggttggagaggcccttccagtggccccttccccgtagagcgcatcagccagacggtagagattctaaaacacacggtggacattgaggagaagggagtcaagctgaagctcaccatcgtggacacgccgggattcggggacgctgtcaacaacaccgagtggtgagtgaggcctgctgagaaaggccttgcctaggcggccacagcactcgaggcctggcctcacctccctcctgcccacagctggaagcccatcaccgactatgtggaccagcagtttgagcagtacttccgtgatgagagcggcctcaaccgaaagaacatccaagacaaccgagtgcactgctgcctatacttcatctcccccttcgggcatgggtgtgtggctgtcctggggccaggctcgggagtgcagcccctacaatatggccccctggctgtgcctatgcccacccttggctgctctcggcaggctgcggccagtggatgtgggtttcatgaaggcattgcatgagaaggtcaacatcgtgcctctcatcgccaaagctgactgtcttgtccccagtgagatccggaagctgaaggagcgggtgagcctgccgtcgcacaggggcctggccagggccctggggctgagagtaccagggggacttgtctggcctcaaatctgatggtccttgccccaccacagatccgggaggagattgacaagtttgggatccatgtataccagttccctgagtgtgactcggacgaggatgaggacttcaagcagcaggaccgggaactgaaggtgaacatgcagactggtggggcaggggggatggagctggtgaggggcagaaccagagggctttgtctccttcacattgagcctgctggaggagggccaggtcagcccagttgggtgcaagagtcatttgttctaggagtagaggacctgtacccccttcatccagggctagaaggtaaaggtcaccatgtctttgcctggctggggtgggtcatgtgggccccgtgtggtgcttggcaggtatggagcacttgcccagatccagaggtgcagcagtgggccaggcccccaaccccaaccctcttcccatgggtcaccagaggaaggggctgccccagtggcacaccctggctcccagatttctgagctccagggttggtggctttgggtgccccggcagctagagtgatgatggagaccatgccaggggcaggtggccaccagggcaggggcatcagcatggggagacataggctcagccctggggagggaaggggcagctggagggggtggttcttgatgagggaggagatgaggagggagcatgcctggttgggcatagcctggaaaggccctggaatgtgagccacatgggctctggctccagccaggggcagagaggccagaaaggggcaacgccaggatctctttgaggagagatagttgatggtgatgctggaggggtgccccgggagttacatgcccgtttcccatcagtaaccgtgcaattacgctcaccgggtgtgagcctttctccctccttcccccaggagagcgcgcccttcgccgttataggcagcaacacggtggtggaggccaaggggcagcgggtccggggccgactgtacccctgggggatcgtggagggtgagtagagtcttggggtaccaggtctggtgggggaaggctgtcctgggccggcgccagcccactacccacccccaccccgcagtggagaaccaggcgcattgcgacttcgtgaagctgcgcaacatgctcatccgcacgcatatgcacgacctcaaggacgtgacgtgcgacgtgcactacgagaactaccgcgcgcactgcatccagcagatgaccaggtgcgcgccccagccgcgagccagacctcgcccctctggccccgcccacgtctccataactgagggccggtcctgtcagcccacccagacttgaactttgcaccattccctaagccccccccctcccccagagcctggtctccctagaaccaagtccagggctgtgagggctccggagggcagggcctcagcagtggcggggatgggccaggcatcgccagcccacgctgagcctcccggtggcgccgccccgcccatcctcccccccgccccgcgcagcaaactgacccaggacagccgcatggagagccccatcccgatcctgccgctgcccaccccggacgccgagactgagaagcttatcaggatgaaggatgaggaagtatgtggggcggcgggggcggcggaggcgggcgtcagggatgctcctccgcggtgctgctcacccgccgggttgtctccgcccgcagctgaggcgcatgcaggagatgctgcagaggatgaagcagcagatgcaggaccagtgacgctcgccgcggacacaccgtccgtctccgggacgccctcgcacccctggacaccagaccggactgttcccgacccggagacgcggggccacagcccccagctgaccctaatttattctcagcaccaccccctcccaggtcattgtgtctgtttccgaggggcctggaccgtagcccccgcccagctggccctctctgaccttgggggatcaggagcgaagttgggcgggacttcagagatccgcctcccttgcccttcccccgcccccggacggtcacagcacccaaaccgcaggccctgctctggcaggcaggcaaagctaggcagaagaggattcccaggatcctgggtctgttccctgccccagtgctgcagaacggacttgggagccctcctttgcctgctcccgcgggtcacccagcgagtgctgagaccccattttctgtcgaggcgggccgagtcttcccttatccccagacgcctagcgggcagggttgggctgaatcaaatgggagccctccagacataaggaggccagaggctgcaaggagcggggtcgtgaccgcttacaccccttctccacagcccggcccgacctggagggcccccggggcactgggcggtgagccacctcctggcaactctcggtgccgtcccctgccctcgctcgaggcctcttctccccagcaccgctgtggtgtgccgggatcctgagcctaggcctcccgatgttcccacccgcatgatcccttcccgccacacgatgctccgttttcttccgttgtgaatgccgcgtcctgtcctggtgacaggagaacaatgttggtgaacgtcgcagcgggtgtccgagtgctccgtgtgcccctgagagcgggtgggagcggaagcctgagcggcctgcggcctccggcgatagtgtgctatctgccgctgcagcgcgcgtccgcgcggcctctgggctatttctggccaggccgcagcactgtggtcggtgcgggcgtggcaggggcggggcggccttatcgctcggctctcccgcctacgcctcccgctgcagagtaagccgggctgccgtcttctcgccatgggctccggtgagtctggagtccggtcgggcccccggctgctccctaggccgacccgggttgagaggagctctggtcgtttggctgcagctgggagagacttgggtcagacttagaggggacttccagccggcgtgcggggtggtcagggtggagaggctggcgggctaccgggacgccgggcatcaggggctggatggagccgggccggcagtctgggtactcagagatgtcgcccaggtgcccgccgaccgctcggcttactgcggcgcttcccttgcagg

SEQ ID NO: 8 - DNA, 3025 bp, Homo Sapiens
ctctcacgacctgatttctacagccgctctacccatgggtcccccacaaatcaggggtacagaggagtattgaaagtcagctcagaggtgagcgcgcgcagccagcgtttcccgcggatacagcagtcgggtgttggagaggtttggaaagggcgtgccggagagccaagtgtcagccgcctagggcttgccggtcgctccctccctccctgcccggtaggggacctagcgcgcacgccagtgtggaggggcgggctggctggccagtctcgggcccctcggccaccccggggaccccccccaagccccgcccccgagtgttcctattggcctcggactccccctcccccagctgcccgcctgggctccggggcgtttaggctactacggataaatagcccagggcgcctggccgagaagctaggggtgaggaagccctggggcgctgccgccgctttccttaaccacaaatcaggccggacaggagagggaggggtgggggacagtgggtggggattcagactgccagcactttgctatctacagccggggctcccgagcggcagaaagttccggccactctctgccgcttgggttgggcgaaagccaggaccgtgccgcgccaccgccaggatatggagctactgtcgccaccgctccgcgacgtagacctgacggcccccgacggctctctctgctcctttgccacaacggacgacttctatgacgacccgtgtttcgactccccggacctgcgcttcttcgaagacctggacccgcgcctgatgcacgtgggcgcgctcctgaaacccgaagagcactcgcacttccccgcggcggtgcacccggccccgggcgcacgtgaggacgagcatgtgcgcgcgcccagcgggcaccaccaggcgggccgctgcctactgtgggcctgcaaggcgtgcaagcgcaagaccaccaacgccgaccgccgcaaggccgccaccatgcgcgagcggcgccgcctgagcaaagtaaatgaggcctttgagacactcaagcgctgcacgtcgagcaatccaaaccagcggttgcccaaggtggagatcctgcgcaacgccatccgctatatcgagggcctgcaggctctgctgcgcgaccaggacgccgcgccccctggcgccgcagccgccttctatgcgccgggcccgctgcccccgggccgcggcggcgagcactacagcggcgactccgacgcgtccagcccgcgctccaactgctccgacggcatggtaaggccgggaccccaggaagtgaggaagttagggcggcgctcgggatatcagggacgcgtttccgagggcggggagctggccttgcgggaggtttgggccaggatccttcccgagagagaggacccccttgtcctgggcagctgtcactggggtagcctgttttggaagtgtgcgggcaagcgttcgagctgccccattgggggcgctattagaacactgcagcgcgaacgtgaagatctttttctctacttatccctacttccaaaatgtaaatttgcgccccttggtgactgtccgcccttggtttggccctgcatgttgcagacctcatctcctacccacccgtaattacccccccaaccaggacaggtctgggcccggaactagagccttaggctagagttagggagggggcggctacaggaattggtgttcgggcctcgagccgtcccgcgggcctgactcagtcgcccttgctgtttgcagatggactacagcggccccccgagcggcgcccggcggcggaactgctacgaaggcgcctactacaacgaggcgcccagcggtgggtattccgggcctctccctgctcgctcctcctccttcatggagctgtcctggcctctatctaggacgctcccacccccactcacacacgcctatgtcctgggaagtggtgcaggagatgaaatactaagcaagtagctccctgtcttttcgattgtcccggactctaactaaagtcctcagtttccaatctgtctcaaagtactgggcccgggggtgggaggcttgtcgcggccccacccctgcttactaaccgagccctccccgcgcagaacccaggcccgggaagagtgcggcggtgtcgagcctagactgcctgtccagcatcgtggagcgcatctccaccgagagccctgcggcgcccgccctcctgctggcggacgtgccttctgagtcgcctccgcgcaggcaagaggctgccgcccccagcgagggagagagcagcggcgaccccacccagtcaccggacgccgccccgcagtgccctgcgggtgcgaaccccaacccgatataccaggtgctctgaggggatggtggccgcccacccgcccgagggatggtgcccctagggtccctcgcgcccaaaagattgaacttaaatgcccccctcccaacagcgctttaaaagcgacttctcttgaggtaggagaggcgggagaactgaagtttccgcccccgccccacagggcaaggacacagcgcggttttttccacgcagcacccttctcggagacccattgcgatggccgctccgtgttcctcggtgggccagagctgaaccttgaggggctaggttcagctttctcgcgccctcccccatgggggtgagaccctcgcagacctaaccctgccccgggatgcaccggttatttgggggggcgtgagacccagtgcactccggtcccaaatgtagcaggtgtaaccgtaacccacccccaacccgtttcccggttcaggaccactttttgtaatacttttgtaatctattcctgtaaataagagttgctttgccagagcaggagcccctggggctgtatttatctctgaggcatggtgtgtggtgctacagggaatttgtacgtttataccgcaggcgggcgagccgcgggcgctcgctcaggtgatcaaaataaaggcgctaatttataccgccgtggctccggctttccctggacatgggtgtgggatcc

SEQ ID NO: 9 - DNA, 11913 bp, Homo Sapiens
taaagcagggtgttactaaagaaagaaggaagaaattggctaaacgaatttagaacacaaataaaattactgcacaaataaaatctctgcttacgattaagctggaatggcggtcaaaaaagaaaagggaaaaaaaattcctagatgcaggtagatttctataattaagccatttctcaaaggggaagtaaatgtgacagaatatttagcaagcaaatttactgaggaatattttgttcctatataattaaattcaacactgaggtaaaactgacaactattaaactgagggcagttgggagagggaaaggggatgagataaaatccagtctataaaacattccattatcttttataggttaaaaaacacaaaagaaatacttggaaagaattgtctaagacggaaagattttaagattgtgtgactttttttttttttttttttttttttttttttttacaggtgcagaataattttttttccctctctcgtggtttttcttttccccatttttttcccctgttgtttgcaaagttgaatctggggtcaggagttctaattgtaacctcagactggaattccagatggtgcgctcaggactggaagcaactctcagttcatcaatttcatgggcctacgtatctgctctggccacggcctggcctccatccccactgtggcattaatgcagaacaaattgagacatatcctctatataattagttccagaatttaaaaagatttacggtataataatagaggcagtgccgcggaatcctttcactgaggactctcggggagctcggggaccatctcgcggtggcatcagaacagacgagtaaccccagcggctccaggcactgcgaactgggggagagggggaaattttgcaccgcattcggcagtacctaacggttccgggctcccagatagggtcagcgaggagagttaggacagtaagtggggactggttaaaaaaaatcgacttaattttgaaatgatcagaagaagctgggagtagttatcacaaagcccctcccttgcccccccctttttttaattgaaggaatgacgttgaaattttcaccgccagcgcggggctgggaaccatcctaaacacttgccctgcagccccgagtgggcagattccgaagagttggagtcggcggggaggggaggaacagctgttgggctgtcttgcgcgtggggctcggggcgcgggccccggggagaggcgctagtcgaaagcttgttcctctcccgcgacaggcagcagcgaggtcgagccactctttattacggcctgcgggccccgcgcgcagtgtggctgtccccgcccttgaccgaccgcagcgctttggggtgtttattcagttgtccgcggccgctgggtgactcccggagggcggcccaggcgtgcgcactggtccctggggttgcggctgtagcagcccagctccgcgctctgtcagatgcagtggacagcgccggggtgaaagtaagggttgagaaatcctcactgccctgctcctacccagcctcgattttttcatattgcaataattatgcaccttcgaggccgggatgcctgcgctttgccagtgtatcaacgccacatggttttccaggggctgtcctcgcctctgcatcccattagctctgaagaggtagaggggtggtgggtaaaacctccaactggacgttgagagacccgggtttcagctcggcgttgccactaacttgtttcctgtccttaaacagtagtagtaacaaaaactgtaaagttgattgagtcaaaggcccacactgctctcctatctaatcctcagaacaactctatgaggtgggcgctagtatcccattatcccgtttgaccagtaaggaaactgaggctcagagagactgcggaactcgtctagggtcacacagctgttggttacctggcagagctgaggttccattctggggccaccaaccccttgctctttaccgctgcgctccatagactgcctctccttcggctgtctgggcctcagtttccttctctgtaaaacgagaagtttaatctgcagctttctttgccaatcggtggttcagaccaggaacctctgctacagatctcggcgctgacaggggtaagaaggtgggtgaaagaagggggcgcccagttttccacagcctgcttttctctgggacctcgcgaagggcgggcctcgcgagctaaaggaggtacaggagagcgcctatcgtccgcggcgggtgaaggtgctacctgccttcgtgctaggctgtgagtcctggtgcttagctcagggcgccaaggccagtgtagctggcatgtcccccttggaaaacctcaggtctcccgcagagaacgttacccacaacaaagaagaggacagagaggcatggagcgccctgcgactgcaggagtacgtcagttccccagcgctggcttagtgtcgcctgggcttccgggcatgtggatccgttggggtcgtacggagacttcctgtcgggtccctggggtcctccgactgcggctcctcagcttagcactttcttcttggccccgcaggctgcagggaactcctcccacctctttagtcggagaagtccaagtcgggcgagggggcaccccggggttcgcaccggtgctcttcccctccccgcccccacaaggattctgagaaaataaatggcagaggagagaggagttctacatttgcttggctctcctttcctcctatccacccctacatccctcaccccggggcaaaaacttatttttgaaaaatgttggcagagatttacgtgtctttgccttacctgggtttcacaaacacaacgactcacattcaagccagcctcccttcagataacctcctctccccccgctaaaagtgccaaggatggtaaaagaagaaacaatctcaatcttttcgtttggaaatgaaagtccccggcttttcataaagggctcctcgcccctcacagttgagtcctagttaagaaaaacgacttccaagtagaaataataggcggggagaaggaagggagatacagggatctggggggttcttagggcaactggcagtgaattttgtctcgagagtcctttctccactcaaaaaaccaaacgcgcgagccccgcgaaaggtttagggatagatcgtgtgggagaggactgagcagagagcgtgggggcagtgtcttgtagaatctttcttttcttaataataattttaaaagcttctgagtggagacgacgcaaagtcaagcagcaaaggtggcctgggaggcaagcggagggctcaagtgccgcatctttaccctcagggtctcctgcgcctacgggatgcgcattcccaagaagtgcgcccttcgagtaagtcctgggcccgcacacacttcgggtccgcagccagaatttaatggcgacaacgtttatgcaatgcaagctaaaaaccaaagcgtaaaaaattactatgtcatttattgaaacgccattctttgtcaaactgcaactactttgcttcacataagtttggctggaaagcttgcagccccagcccgggccagccaggtacaggaggccggactgcaaccggttgcttccctcccgtcgcgcctggccgtcccacgctgcgccgtcgctgctgcctcctggcgcccctgggattttatacgcacctctgaaacacgctccgctccggcccccggttcttctccttgcctaggggttgtttcccaatagatactgactcctttagaagatccaaaaaccaaaccaaaacaccccctacccgccccaaacacctgctctggggcgcgggggctgccaaacagagactagacgaagggagtcagatttagcgaagctcttcgagctcccaaagattcgaacactaactcgcgcccgtgggccgatggaggttctccctactccactccttggtccccttaactggcttccgcctcctggtcaatcactgagcaaccagaatggtatcctcgaccagggccacaggcagtgctcggcggagtggctccaggagttacccgctccctgccgggcttcgtatccaaaccctccccttcacccctcctccccaaactgggcgccaggatgctccggccggaatatacgcaggctttgggcgtttgcccaagggttttcttccctcctaaactagccgctgttttcccggcttaaccgtagaagaattagatattcctcactggaaagggaaactaagtgctgctgactccaattttaggtaggcggcaaccgccttccgcctggcgcaaacctcaccaagtaaacaactactagccgatcgaaatacgcccggcttataactggtgcaactcccggccacccaactgagggacgttcgctttcagtcccgacctctggaacccacaaagggccacctctttccccagtgaccccaagatcatggccactcccctacccgacagttctagaagcaagagccagactcaagggtgcaaagcaagggtatacgcttctttgaagcttgactgagttctttctgcgctttcctgaagttcccgccctcttggagcctacctgcccctccctccaaaccactcttttagattaacaaccccatctctactcccaccgcattcgaccctgcccggactcactgcttacctgaacggactctccagtgagacgaggctcccacactggcgaaggccaagaaggggaggtggggggagggttgtgccacaccggccagctgagagcgcgtgttgggttgaagaggagggtgtctccgagagggacgctccctcggacccgccctcaccccagctgcgagggcgcccccaaggagcagcgcgcgctgcctggccgggcttgggctgctgagtgaatggagcggccgagcctcctggctcctcctcttccccgcgccgccggcccctcttatttgagctttgggaagctgagggcagccaggcagctggggtaaggagttcaaggcagcgcccacacccgggggctctccgcaacccgaccgcctgtccgctcccccacttcccgccctccctcccacctactcattcacccacccacccacccagagccgggacggcagcccaggcgcccgggccccgccgtctcctcgccgcgatcctggacttcctcttgctgcaggacccggcttccacgtgtgtcccggagccggcgtctcagcacacgctccgctccgggcctgggtgcctacagcagccagagcagcagggagtccgggacccgggcggcatctgggccaagttaggcgccgccgaggccagcgctgaacgtctccagggccggaggagccgcggggcgtccgggtctgagccgcagcaaatgggctccgacgtgcgggacctgaacgcgctgctgcccgccgtcccctccctgggtggcggcggcggctgtgccctgcctgtgagcggcgcggcgcagtgggcgccggtgctggactttgcgcccccgggcgcttcggcttacgggtcgttgggcggccccgcgccgccaccggctccgccgccacccccgccgccgccgcctcactccttcatcaaacaggagccgagctggggcggcgcggagccgcacgaggagcagtgcctgagcgccttcactgtccacttttccggccagttcactggcacagccggagcctgtcgctacgggcccttcggtcctcctccgcccagccaggcgtcatccggccaggccaggatgtttcctaacgcgccctacctgcccagctgcctcgagagccagcccgctattcgcaatcagggtaagtaggccggggagcgccccctacgcgcggggcagtggcgccagggactctccgctctaggacacccccctctcctaccccttttgaccgcagctcttacccagctgcttcccaagggccgtgaggatagcggaagcggcggctggggaggaggccggagagtgggagtgcacgcaggcactggcccccgacatcctccaaagccaggcagagctaggagcctgactgttcgcaagagccgggagggcgtctggggccccttagagtccgagagattccgggactgctagtccccacgggagtggaaccaggagaccggcgcagtgtctggctctgccttggggagagttttgttaattaaggaaacgccaaattgtcaccaagcgtagcgcttttcagacgtctggactctggattcggagtgggaccagcgcgggggtgagcgcctgtgctgtgctgcctccgcagcgctaaaatgtccaggagcacctccagcccttataatacggtgttggcacacacttaggtgcacattaagtatcgtagagaactagaatgagcacatgcacctccagtaactaaatggctttctggaacagcgtcgtgtccgtggatagctcccgcgtatggtaatacagaagtggatcttcactgggcttcgctcaggcggcggccacgcaggttctggggatggaagagaacttgacttatccgagtccaagctatgcgggaccaggttctaccgcaggcagtggaaggaggcacgagctttggcctttctttcagcgcatctggggcgcctcttcatcttgtaaacgcggggctcagctgggacagtatttcttcaagacctggggttagaacaaggacagggttattcgctgtgcttagtcaggatacaaggagggaactcggcacacgataagtatcaggttggtttctcatcccgcgccgatgcccgcccacctctctttcgcctgggcggcgcggacccgaacctgcggagcccctgtagtttgccctcttcatttattttcagtggatttccacgctattgagaacctaagccagttcggtttgattcggtaatttagtaaacgctttactaatacaatggcggatgcttttcctggagcaaaattactcgagggcctagggaccgggatgtttttggaatgcgtgggaagcagagtgtatcttttgcaggaggtaccttcgcccaaggctcgggagaagggctctgcccttgttgcccgccttcacccgcgccttctaaacgcgcgtcttcaggccgctcctaccttagcctaaccaggagcacccggcccccgcgaagccttggagaaatcgaaaccgcccttttcttcgggagaatctgggatcactgtcctgtggaggaaccgcaagcagacccaagggttgcctccactctatgcttttagttagtgaaattagtgttttgtactcaaggggcgttgggacaacttactggtcgctgaggcttgtgttctttgatcagatcgcgccacctttgtttagcaggctggtgttacttttggggagtttctaggtctcagtgtccccgtctataagaggacagctgagatgggcaacctggagattgggtccggcttgaagttatactccatagatgcagaagcgctacccaccaccctcttggggctttaaatatggaactcggcaacccatctaaacatctgtgactgagaaacaatgaatccgagagcactgtctgcatgtgtgctatttggaggcggttgagaaaccatcgaatccatgcccctggggcacaaaatactactacgccattatctttttagtacttctaggggatttttgaaacctgggttctgtcgcttcgtttgggtcccttgtccagcccttttcagggcaggtctggtgcctgggatcttatcacatgtcgtggggggtgggactgtgggttttgcagccagcaggcattacacttctggaaaatatctggattcttctgtaatatacaggcgtggctgccatggagaaaaagttaaaaggggaccaggactagtaggtgaatgtatccttcttctccaccctggagaaaaagcccaatggagagagggccctagattcaagtcatatagcctggaagcaccatctccaggtttaagttttgtcttgcagtgaaaacagatgggtccatcttacccagcccttgaggctcattgggcagcttggatgtgagaagcgctccggctgctatcctggagtgggcaagggtggccctcgagattctgggtttattctttggatttccagggttcctgctgcttccccaggaatgcagggcctggcccaagacttgggctgtgagaggcaagggcatcaactctcaaaaatgtggaaatggccatcagagcgccaaggccaaaccccaggggagaggaatcaaggccgtctctggatccctagggcagtctagccatggtgcacaggcaggggcaattgttggtacccactcacaaccgcccaaaacttcacaagcatgttcatattttaaattcttaaatattatatcttgcatcctaatcttgtaaacattaatttagcaaacatcaatcgcctacttggtcaggcactgggttctgaatattaattaagacaatggcctcgagaacctttgcaagaagctcaccagctaatcctggagaggccccttgttttggatgaggaaatccaggttctatgagattaggtggcagaggtgggatttgaacccagaccatgctagggtgtttctactccttttccagggatcttggccccaccgttgagatggatttcttctggcctgcgggaggggcaccaaactcttagtccatgtgtgggggttgacgggtttgtgagggcagatgtggggtgaggacttgagtagccccagactagatgcaaggcttaaggaggaggggaaaaaagcttgcttgggccggacgcggtggctcgaggcggttggatcacctgaggtcaggagtttgagaccagcctggccaacacggtgaaaccctgtctctactgaaaatacaaaaaaaaaaattggccgggcttggtgacgggcgcctataatcccagctactcgggaggctgaggcacaagaatcgtttgaacccgggaggctgaggttgaagtgagctgagatcgcgccactgcactgcagcctgggcgacagagcgaaactccgtctcggaaaaaaaaaaaaaaaaaagaggttgcctgctagtccactgatcccgcagccccgcaggctcgcagaaccctaaggcatgattaggcctgggatcatcaggccaccctagggtcaggtgcggaggcctgcgacgcccgagggccaaaggctccctcttccggtcacacaggagagggtattttgttgggggacaggttttccccaatcacagtgcagctgcagtcatcgttttcagccttctgagcaccttcctggctgagcctgctgtccatttcacccctcagctctcacggcccggccaggccaggcggttcccggcttctctgcagccgccggcgggggaggagggcacagagcgcgtctcgcctcttagcgcacggtcaaggttgcgctcccctcccgggccgggactaaccgtgggaaaggcgctaccttggccactcgattctctccctccaaggcctgtacaaggagcctttgaacacgctgctccttccagccggcagctttacctcccctggcccctgcccccgcactctccgcgccaggccaagcgctgggcccagggacagcgcgctctaatcaaacccgtgtccgataagcttctaattaaaagagacctccctccgctccgcaggcgctttcaccactgcccctcccggggggacctgaaggagagggtttgaggccggtctttgcccgccgaggtctgcgtgtccggtctgggaggaggcctaggagggctcgcgggccacgggcatccttgggcccgagttctggggtgcggacggacgtctcgagagtgggtgccgcgactcgggacccacggccctcgccgggcacggacagttgcggagcagggctctgaggattgtgcagtgccctgggtccctgcctactcctgggctcaggaatggagaagggttcgtctagagaaaacttcttcgtagcttctatttcgtctctctctctctctctctctctctctctctctctccctccctctctctctctctctctgtgtctgtctctctttctctctctctctttttagtgtcctttcagaaattcggccttcactccgggcaatagtgggtgccctgagccaaatttcgtttgtaagctcatctataggcctcaaagaaggccaggcctcaggtttcaaaaggaagtctgtggaagcccaaacgtgctcgcccatgcaggagagctaacggggccgggggttatctttgcccacttagcaggagagaaatggaggccctcgaggtcatatgataaaagctagtggcttctcaaatccccagtgtgtggtgctgagcagtgtgtgagacttaagcctggacctgtactatccgggagttaggatttgccccctccttccctcccttgcactctgccacaccaccctccaggctcatgcctctgttgccccagagaagctttttttttttctttttctttttttttttttctgggcggggggtggtggtgtgtgtgcatgagcgtccgtgtgtgtttcgaaaatggaggtaacgatgccctgggtcctgctcatcggctgagtcctgcttaagtctttggaggcactttggtcaaatagtgcaagagtgggagaatgggtgctgtttgacccaatttactcctgagaattttgtgaagtttggagacccagggcagtcctgggccaggaggatctgaggctgctggggtggccctgccaggatcccataggagcagctctccttagccattgtgtctggacttcaggccacagactccggaacttgtagaggaatgagaccccatccttgggttccggggccaatgacgtatctttagccgaaggatccttttccccagaggcagcaacagctttccagaagcttgtggggtataagtttaaagcaatttaataacaaaaattataaaagactatgttttccaactgaggctccacgctctttttctcactttgggggggggggggaatgctaggatttccctagggggaaactgaggcaaaggaccgaagcactaccatggagggaaagggagatacagtgtcaggcacactctaaaggaaattggttgtccagcctggggagtgaggaagttggctcctacagcagtggtcagggtcggacccctgggcgcaaggtgggtcccataggggggaggaggaggagagcgcagggtcgccatctgaaggcccaactggaaggggcccttgttttccccctcaccagctttcccttgggtgtcatggtgtcaggtcgggtagccccagacagataacattactcggtaattactcttcccatttttaagaccaggccatttaactggctccgagtaattaatgaaagttggtgcgcgggcccctgatttacagctcggagtcaacgcggggttagcccagcagattcatttcgcttgcccgcgctgctcctgcggaagagctgcagtttatttttggggggtgaacaaccttctctgtcgatcaggcaacgagttttatacttaatttgccaggggttcgctgcagaagcggcagagaccgtagaagactgcggcataaataaattgggaaaaagcgaggtgggggttttagtcagaaaaggatggagaagcctgtcccaaggtcacatccagggacttgggccgtcttcctgccgaaagtcctggaggcttgtggggctggattctcctccgctgggggtccgaatgcggggttcagcgcacaccccccccgcccgtggctggttcagacccactgccccgtcttgcgagagcaccgctgacactgtgcttctctccgccgctcccgcagg

SEQ ID NO: 10 - DNA, 4316 bp, Homo Sapiens
ctgcagctaataaaaaaaaaaaaagaaagaaagaaactggtctctgtcctatttcatatgctcaggtacaacttttccagagaagaagaggaggggggcggggaggagcaggaggaggaggaaagaaggaggagaaggagaaggagaagaagaggaagaggaagaggaagaagaagaagaagaagaagaggaagaggaagaggaagaagaagaagaagaagaagaagaagaagaagaagaagaagaagaagaagaagaagaagaagaagaggaagaagaggaagaagaagaaactgtctctagaccttcattctcaggacaagttcattgtctggcaccaagctccttggggtgaattttcttccaaaagagtccggggagtccaggtatggaatgggaggcagaaagttcaatcaagggactgggatttcggaatgaataatgaagggagatggactgggtccatgccgaaggtttctccctggtttctcagcccccgggcgaagactcagggagacattgagacacaccctgcacaggagggggagggggagggggagggcaaagtcccagggccccaggagtggctctcaagggctcaggccccgaggcggtgtctggggttggaaggctcagtattgagaattccccatctccccagagtttctctttctctcccaacccgtgtcaggtccttcatcctggatactcataacgcggccccatttctcactcccattgggcgtcgcgtttctagagaagccaatcagtgtcgccgcagttcccaggttctaaagtcccacgcaccccgcgggactcatatttttcccagacgcggaggttggggtcatggcgccccgaagcctcctcctgctgctctcaggggccctggccctgaccgatacttgggcgggtgagtgcggggtccagagagaaacggcctctgtggggaggagtgaggggcccgcccggtgggggcgcaggactcagggagccgcgcccggaggagggtctggcgggtctcaccccctcctcgcccccaggctcccactccttgaggtatttcagcaccgctgtgtcgcggcccggccgcggggagccccgctacatcgccgtggagtacgtagacgacacgcaattcctgcggttcgacagcgacgccgcgattccgaggatggagccgcgggagccgtgggtggagcaagaggggccgcagtattgggagtggaccacagggtacgccaaggccaacgcacagactgaccgagtggccctgaggaacctgctccgccgctacaaccagagcgaggctggtgagtgaacccggccgggggcgcaggtcacgaccaccccccatccgccacggaccgcccgggtccccccgagtctccggatccgaaatctaccccgaggcagcggacccgcccagaccctccacccgggagagtcccaggcgcctttaccgaggttcattttcagtttaggccaaaatccccgcgggttgggcggggagggggcggggctagctgggcggggctgactgcggggaccggctagggtctcacaccctccagggaatgaatggctgcgacatggggcccgacggacgcctcctccgcgggtatcaccagcacgcgtacgacggcaaggattacatctccctgaacgaggacctgcgctcctggaccgcggcggacaccgtggctcagatcacccagcgcttctatgaggcagaggaatatgcagaggagttcaggacctacctggagggcgagtgcctggagttgctccgcagatacttggagaatgggaaggagacgctacagcgcgcaggtaccaggggccatgggcgccttccctatctcctgtagatctcttgggatggcctcgcacaaggttgggaggaaagtgggcccaatgctaggatatcgccctccctctagtcctgagtaggaagaatcttcctggctttcgagatccggtaccagagagtgactgtgagagtccgccctgctctctgggacaattaagggatgaaatctctgagggaatggagggaagacagtccctggaataccgatccgcggtcccctttgagccctccaacagccttgggccccgtgacttttctctcaagttttgttctctgcctcacactcaatgtgtttggggctctgattccagtccctcggcctccacttaggtcagggccagaagtccctgctccccactcagagactcgaactttccaaggaataggagattttcccaggtgtctgtgtccaggctggtgtctgggttctgtgctcccttccccaccccaggtgtcctgtccattctcaggttggtcacatgggtgctgctggggtttcccatgaggagtgcaaagtgcctgaattttctgactcttctcagatcctccaaaggcacacgttgcccaccaccccatctctgaccatgaggccaccctgaggtgctgggccctgggcttctaccctgcggagatcacgctgacctggcagcgggatggggaggaacagacccaggacacagagcttgtggagaccaggcctgcaggggatggaaccttccagaagtgggccgctgtggtggtgccttctggagaggaacagagatacacatgccatgtgcagcacgaggggctgccccagcccctcatcctgagatggggtaaggagggagatgggtaaagaggggaacgaggggtcatgtcttttctcagggaaagcaggagcccttctggagctcttcagcagggtcagggctgaggcctggagatcagggcccctcaccttcccttcctttcccagagcagtctccccagcccaccatccccatcgtgggcatcgttgctggccttgttgtccttggagctgtggtcactggagctgtggtcgctgctgtgatgtggaggaagaagagctcaggtaggaaggggtgaggagtggagtctgagttttcttgtcccactgggggttgcaagccccaagtagaagtgtgccctgcctcattactgggaagcaccatccacactcatgggtctacccagcctgggccctgtgtgccagcacctactcatttgtaaagctcctgtgaaaatgaaggacagattcttcacttcgatgattatggtggtgatgggacctgatcccagcagtcacaaatcacaggggaaggtccctgctgatgacagacctcaggagggcagttggtccaggacccacatctgctttcttcatatttcttgatcctgccctggatctacagttacacttttctggaaacttctctgggatcaaagactaggggtttgctctaggaccttatggccctgcctcctttctggcctctcacaggacattttcttcccatagatagaaacagagggagctactctcaggctgcaggtaagatgaaggaggctgatccctgagattgttgggatattgtggtcaggagcctatgagggagctcacccaccccacagttcctctagccacatctgtgggctctgaccaggtcctgtttttgttctaccccaatcactgacagtgcccagggctctggggtgtctctcacagctaataaaggtgacactccagggcaggggccctgatgtgagtggggtgttgggggggaacagaggggactcagctgtgctattgggtttctttgacttggatgtcttgagcatgaaatgggctatttagagtgttacctctcactgtgactgatacgaatttgttcatgaatattttctctatagtgtgagacagcttccttgtgtgggactgagaagcaagatatcaatgtagcagaattgcacttgtgcctcacgaacatacataaattttaaaaataaagaataaaaatatatctttttatagatacaggtagatatgtttttatagcatgcacgtaaatgtgtgtgtgtgtgtgtgtgtgtgaagagaaagagtgaatagagagattaagattcttttaatggtgaaaagatatacatatatttggaattagccagcttgactcagtttaggtgatcccaattttggtggcaacaaccaaagcatcgtagtcaggagccagtcgaacatatgccttcctctctccatcagactgaatcagagtgttgactttggccacatcaatgtcacaaacttcttcacagcctgtttgatctggtgcttgttggctttaacatccacagtgaacacaagtaggctgttgttttctatcttcttcacagcctactcagtggtcagcggaaacttgatgataacatggtggtcaagctt

SEQ ID NO: 11 - DNA, 14147 bp, Homo Sapiens
gggggcactgagcaatacacttagattaacaacatctcacaagtgtgagtaccattgatttaaacttctttgttggttgtgttttgtgtttatgtctgttctacattcattttttccagagttgcctcccttagagtttcagtaatttttatcttttcaaacctttccagccatgggaaggactagcaggtgctagtggacccaaaagaacctcagacctgctgagatttctgattcttggtgttcagaccaattagcaaatagtttaattaaacggcctgctttcatggtcaacacaattctgaactggtggtcatttagaccaagtccactttgtttttgagacggaattttgctcttgtcgcccaggctggagtgcagtggtgcgatcttggctcactgcaacctctgcctcctgggcttaagggattctcctgcctcagcctcccaagtagctgggactacaggcacccaccaccactcccgactaatttttgtatttttagtagagacagggttttgccatgttggccaggctggtctcaaactccgacctcagatgatctgcccacctcagcctccctaagtgctgggattgcaggtgtgagctaccgcgcccagctaaagtctagtttgtataagaaggctttccttgttatgtcacaggattcctgagcctatcaaatagattttaatgttttgagactccacgtacttccccaaaatgaagtatttaaattgtcagtgcctgcccccttgcctggtctttttgatgtactgacctggtctgttagtgtgatgaaaaatatggttgagtcttactgctttattgtaattagtaggactgtctagaagtttaatttttctaagagatgaagatttgagtctatgtagctggctgtcctttaaaaatatttggttacttgggatatactttgaactaactttctggtcattttatgtgatcaaaagtgtcagttcttcctgttcttagtatatttctttgtttgggaagtggaagggatgaaatctctatattctttcctgatgacacagaaaggagtacacatccacatctcatgaatagacatgtaattatagaagaaacagcctaacggccgggcgcggtggctcacacctgtaatcccagcactttgggaggccgaggtgggtggatcacgaggtcaggagttcaagaccagcctgtccaagatagtgaaaccccgtctctactaaaaatacaaaaaattagccgggaacggtggcaggcgcctgtaatcccagctacttaggaggctgaggcaggagaatcgcttgaactcggagggtggaggttgcagtgagccgagatcacgccactgcactccagcctgggcgacacagtgagactccatctcaaaaaaaaaaaaaaaagcataaccatatgactattcacactgccttacatactaaatcagtagtaatttgcttctcacatagcaaataaaaataaatcagcagtaataaacatatcccttttgtgttacagctagcatttggtgaactctgtatttttctcccttttaaagtgttgaactcataggttttcataaggtaagcttacaccattaactaattttgttctcttttttgatgttaaaattgtcccttaggagctgatcaggttcattcttctgttctttaagcattacccccagaatattcttgaaagtattcttgctctctggcaacaacacccatacttcatttatttcctgtccctaaacatacactcagccaacctcaggttccttttaatggagtagtcacttattcattcaacatacgttgggtgcctcctctgtgccacacactgttctggtccctggggatagagcaggaaacaaaaaaaaacaaaatctgccctcatacagctgacattctagtcaggggagacaaacaataaacaaatgaatgatgtagtatgtcagatgttgacagtgctatggagaaagcatatcatggagatcagaagcattacctgcaatggaacagtcatgattttaagaagaatggctgactggatgtgaagtgtgagagagaggagcccaggtttttggctgagcaactggagggatggagttgccattatctgagatggagaagttaggggaggagtagatttggaggggaaggtcaggaatttagtctggaacctgttaagtatgaggcacttattaaacactgaagtggatttttagaagatgtcattaaaactagtcaagttcaggagagagttctgggctagaaataaaaatgtgggagatattggtatatacatgggttcatactacttttttttccaatttaacatcctatcttattgctctctgcttttccaacagtatttagtttcatttacccctcaaactgactcctacattgacagcacaataaaatccacattccttattatattaagaccctgtgtgatctaacctcttcctatctcttggaccttgtcttaggccactttccctccccactcaatttctaacactctgacctcactgcttctcaaacagctctttgttgcctcttgtcctttttgtggaaaaggccttcctactgcttaaccattaggcattcttcgattccttctcattcttcattcttgagaaaggccttccttgaccctttatatcaattaggattcttttgggcgagatctgatccaaactggcttagagaaaaggagtcaactgactggttcatgtaattcaacctccttcctctgctgcaaccttcccttggctcccatctcacttaaggtcaaagccagggtccttaccatggccttgtaggcttcacacagtttgtctccctcattacctctctgacctcacctcttacattcccccttcacttattcttctccagccagagtggcctctttgctgcacctcaaacatgccaggcacactcccacctcagtgcctttgtgtttgctgccccttgtgtgtggaacacatcctccatatagccacactactcaaaattcactgtctttaagtctttactcaaatgcttctccgtgaagccatccctgagccctctttaaaattgcagccccccactcctgtactccttattgtctctcatttttaatttttgttattgtagttagaaccatctgacacatagcttttattccattggttttttgttatgtctttctttacaagaatttgaagtccatcaggccgggagttttgtttgttgtgtttgctgctatctcccagtgcctaaaattgcctggcatacagtaggcatttaataatctttgaatcagtgaaaaccagatggtggcttggcatttccacataggaatgagccaggtggaaatcatccaggatataagtagatcttgaagtgataaggaagggtcatcataatcatgtggggcccattttgccctttcttgtttcttttctctaggctcagcaacagcctcaccaaggactccatgaatatcaaagcccatatccacatgttgctagaggtgagagcagctcaccccactaccagactctgtgtttagggtggtgacctgaagaaggaagagagcgaaagaagggaaggaccatctttccctctaaactggagtcaagggagggaggtcagagcaagcctgggggcgtaacccagacccagtctttgttcaatctcttctgtcctctttttcaggggcttagagaactacaaggcctgcagaatttcccagagaagcctcaccattgacttcttccccccatcctcagacattaaagagcctgaatgcctttgagtcacatggcccttctttttccccataaaccctgctagttgccacgggggcctgttcctagggcacaaagttactgagagacccagagatccagtctctctgtggaacctccaaaatgccccagcagtcctgcctccagcctgttgcctggcagtatttgccagttgaccttatgcactgccctctcttctgtcatcttggcaacctgggccccccacctcaccctttcttccattccttttcctagacgccaccctttgaattgccatagagaatgggccaattcatggtggaggtttgttcattcccacaacaatcaaagggccctaaggtttacgctttcacacacccaatcattccccaggtaccccaaattacacccaaaccctaactcagccctaccttgtcttagcccctgcttgtaagtgttccagcttccaatgggcacagacctggatcccgctctccctagtcgggcccctattctaggttgagtccagccaccgccaatcaatgcagagccaggttcctcccctttttaactctggccgcagttcaaccctgccctctgaaagcatttcgtttctgccactcaatgctctttcgtgtgcctgacagccatcctgccctcctacctccgctgtgttctaaattcgtctttacccagctctatggtcttgtctaaccgtagagctgccctgcccgcctacgcggagcccagtccgacccactcccgccggctgctacgcccatttctatacaagccctgcttccgctgagcagcatggcgtgcgacaccgcccccttggtgttttggcaggggtctagaagtccctcgtccgccaatcagagaaaaacagggccacccacccccgtccttgggggctgtcttccatcaatcccatgtaagccaatcagtgtgaggcagacccccgcccccccgacacaggccccgagccttttcagttgctcacagtccgtcagtccttgagccaatcggcgtggagcaccgtgaaggccgaacgcgcctcctcgggactccaggggccgtgagcgttccatcatttccccttacgccaatcacggcacagctctgtagggaagggcccgtcccccaacccctcgaggccttgcggccgattaatagcgctttggccaatcagcgagcggcgggacattgggctcctcctcctcgggcccacgtgagctgtagggaaacgcaggggcggcttctaggtgctgccgccgccaccgccaccaccacctccaccgccgcctcggaacccaggcctggggggcggtggggccgcgtatggagcccccgccccccggagctgccaacattgccaacgccaccgccacgctacacacaggtgagctctgggcctggagggtggagggcccagtccgtgaccccacgtatccttcccgcccccgcgcagaggatgtggcttggccggtggcctgctggtgttcgactccccgccgccaccaccacggctggtggacctgcgtgtggcattgctcaagcccttcgtcccttatagtggatctgaccgtggcctaacctccccctcccgttgtataatggatcggtctgcgtgcttatgtttttccccacgccaacttagggtggactcgtccataggctttccccctacccctacccccacccgccccccacccacccccacttatagggagctagcctgtgacagtgttcagcccccttaatagtaggtgtatctgagtgtttggatttctcctagcctcaactttcaggagacccgtccgtggccttatttattccacccttcctgtacatcgtagcgaatcaatccgtggcgccgcactcctccgcatccctctttaacagtgagtctacctgagtttgtattcctgcctcctccagtcccccaatgcatcagtccatggcttttttcaaaaccaccccccccccccaccaccaccaccaccattttatagtggatcagtcttcatgtttggattcacgtccctttagctatcagtccattgccctgtctcctctttttcgtagactgtcgctctagcgcttggggttctctcctttttaatagtgggttagtttagtgctttacatctccctattttcagtagctcagtccatagccttttccctctctgctttgaatcagtctgtgtgatggcttttctctcctctcactgtggtgcaggagtctgtaaggttttctgctccccttcccctcagacgatgagcctcatcacccctccctttgcagtggatctgttcattggccttcctcccccacacccctgtatgcttgcacagtcccccgcataccctcccgtgagtccagtgctttgtaattgggggaagatcggccgtgtactttcaatttccttctctttttttttcccttcccagaagagaacgtgctgatcctcttttccttgtgatggagcactgtacggccttccctgtcctccacctcttaatagtgggtcagcctggtcacactcgtaaccacaaagacgttctgcctcactacaataagtgaatacattagcgccagtgatgatagtaatgccaataggagctagcgtttattgagcacctgccgtatatcaggcagagtgtttcatatgaatgagttcctttaatcctcaccacaaccccatgagataggtagtgagggaattgggccatagggaggttaaattccttactcaaaggtggcccaggaagtactcaggacacaggataatttttgaggctcccctcttagatctcatcccaccccacgtgaggcctcagtccttaaaaaccaaattagttctcacctccaagcttttgttcttgctgttccctctgcctgcagagcagtcttcattcctcaccttctctcagcacccacccaccccccaatcccagcagctgtgtgaccttagatgagtgatttaaccacttcctctctgtgcctttttcttcatttgtgaaatgggggatcagaactagaatcccttccagtgtaaataaatattaactgtgaattaatggtaaaacaagtaacctttctagcattaccgcctataccttcccacccccttactgtgctccaaccacactggttccaccacacagctcctcaaacatagcaggcatgggccagcctcagggcctttgcattggctgttctttgtgccttgaacaccacccccagatctctgcatggttcctttcagcactctgttcaaataccaacccccaaaggatgtttaccacactgtggtgtgtggaatgcagtataaaaagatacatgtatgaaagatgtttctaagaatgccagtttatatatgagtaagggttttcctccttttcaaaaggatgtgttcacaagactgaggtacgtaatatgctctgtaaaggcataggtataaaagctgtttctaagagtgctagttgtatatgtgaataaggactgtgttgttgcattgaaagaatgtgttcacaaaactgtggtgtgtagctgggcacaggggtgtgcacttatagtcccagctactcgggaggctgaggtgggaggatagcttgagcccaggagttccaggccagcctgggcaatatagcgagatccctttttctgaaaaaaaaaaacccaaaaaacaaccactgtggtgtgtgtaatacactctcttaaaggcacaggcgtaaaagatgtttctaagagtgatttgattttgttgtacctgggtagtgttatttcattaaaggttgattgtcacaccatggtacttagaatatactatacaaaggcacatgtataaaaaagaagttcctaacaatgctacttgtaaaaacaaaaaaagtcaacccctccctgaccatctgaagctgcacacccagcagggctcaagccaggtccctgatttgtcccgttgccctttatcactgtctgacacactgtgtgggttacttgtttgttgtctgtctctcctcattagaatgtgagtcccatgaggactcagtttttgtctgctcattcaccgctatgtctccagcaactgaaaatgtaccaggtaaacagcagatgctcaataagaatttatcccatgaataaatgggaaaaagataatttgagacaccagtgtaggggtcacatgaggaagaagaagggatatgagagctaattagttgggactgttcctgcaaccaacctttactgagccccttgtgagtaccaggcactcttctaggtgctggaatatggcaaggaacgaaacagggcgaaatatttgtgcttgtggagctgacatttattaaaagttggggaggctgggcacggtggctaacaccagtaatcctagcactttgggaggctgaggtgggtggattgcctgagctcaggagttcaagaccagcctgggcatcacggtgaaaccccatctctactaaaatacaaaaaaattagctgggtgtggcggcgtgcgcctgtaatcccagttacttgggaggctgaggcaggagaattgcttgaacccaggaggcggaggttgcagtgagccaagattgcaccatgcactccagcatgggtgacagagcgagactctgtctcaaaaaaaaaaaaaaaaaaacccaagctggggagacagactatgtgaacaaaataaataagtaaaattagcataatagacaaatgctgagaagaaataatgaaatagggcaggtaggaatcgagtattgggggtggttgaaatcttaggcatagggaaggtgactcttgaattagggcctcacggtagagacggagagagccttaatgtctacgggaagagcataccaggcagaaggaagtgccagttcagaggccctgaggtgggatggtgcctgccatgttcaaggaacatcaaggcggccagtgtggctggagcagagtgcggggaagggtagaaggtgaggtcacacaggtgatgggagccagatagtgcaggtgatacataggataggattgcaggggcagggggagaaggatgacacactagctaatagctaatatctgtggagtatctgccacacatcagaggcacttttctgttcaaataccaacccccaaaggatgtttaccacacggtggtgcctggaatgcactacaaaaagatacatgtgtcaaagatatttctaagaatgccagtttatatatgaataaggattttcctccttttcaaaaggatatgttcacaaaactgaggtatgtaatatgctctatggaggcacaggtataaaagctgtttctaagagtgctagttgtatatgtgaataaggactgtgttgttgcattgaaagaatgtgttcacaaaactgtggtgtatagctgggcacagaggctgaggtgggaggatcacttgagcccaggagttccaggccagcctgtgcaacatagtgagatccccgtctccgaaaaaaaacccaaaaaataaccactgtggtgtgcataatacactctcctaaaggcacaggcataaaagatgtttctaagagtgatttgattttctggcacctgggtagtgttatttcagtaaatattcattgttaaacactatggtgcttggaatatactatacaaaggcacatgtataaaaaagaagttcctaacaatgctacttgtaaaaacaaaaaaaaaagtcaacccctcaagtcttttacagaagtattttacagaattgacacagttaatcctcacagaagccttggagggtaggtgtacttttgagaatatttgactttgagagtaaaatatccccattttacagatgaggaaacaagcaaagagaggctgagtaacttgctcagggtaaccttgagccagaatagccagaacaggggcagaggaacataaggctgaagactcagaaagaagaacagatttgcaagggcaggcaggttatttggcacctttgatcacgcagaggaagaatgaattcttcctggaatgcgatgattgtgtaattgagtccatgaagtgagggaagagctctccctgcggggagagcagcccgtgcttaccctcagaggttggaactgtctcgggaacggtagatagttcagggtggctgcctcagagcctttgtacacgccgttcgctccgcctgaaggccctcccccacagagggcagcctggcttgctacctcccctccttcaggccaggtgtcacttccttggggaagaactccttgtacaccctgtgtaaaaacagcattcctgtcactctctaggatcttacccttctctgtttctcttcatggagaactggtggtgtaaggcgattgctcactagagccaaaccacttaggttttgaattccggctctgccaacttccagctgtgtgacttggggcaggttacttctctgtacctccattgcctcatgtggaaaatgggggaaatgataatccccaccctttaacggtggtttgaggattcaatgagttaaatgattcaaagagtgtgcagcccacggtaaggatcgtatgcctggcttgcatttttaaattattaaaatgtattcatagcatacccgtagatgtctgacaggcctctgaaactgaccatctccaaaactggtgtgacccccctcaaaacttactctcctgcaaggctcccacctcagctgaccacaatgctgtctttgtgggtgattaggccacaaacctagactcaccctggacccttctctcacctcccccgggcatgctatctgtcagcaagtcctattctgtgttcaggctttctccagaccccagctacttctcgccagccccactgctaccaccatcatctaccgcagtggcttcttcagccccaacagtctgttcttctcacaaccgccagggggatcctgttgaaatctcagtcacagcctgtcatccctctgttcacaaccctcttgtggctcctgtctcactcaacatcctgacagcacccgaaaaagcctggctcagtctggcccccgtcactctgttctcctctcccgctgcctccctcctctcccccgaacccatgtcagcctcctctccccatgtcacctgccaggcactctccagccttgggcccttcacaccggctgccgcttccacctggcttgctgctctcagatactcacgagctcagttccttcacctccttttggtctctgcccagttgtcccctccttggcgactactctcccctgactctccatgtaaaagtaacagctctcccctgcttgatttttttcccataacccttaccaccatctgacgcactcttgtacatgtttgccttttttctcatctgcctttcctgctaagatgtgagctcctctggagcagggattgttgtctgttgcgttctcgactgtatccgcagcacctggcccacagtatgcactcaccaaatgcttgctaagtgaaggagatggaaagaagtaaacatatctaagcaaggcagattactagaactcttatgaggggtcaagtgggagaaataacaaaatacaaagccctgtgtgctgttgaagctggaagcccaccgtcacctttcactcagctgataggttctgttgcagctgaaagaagaactggtaaaattgcctgtctttgccaccaggagtcactctgaactctttggacttctgaaacaagcctgcctgcaaaacaaattcagtgaggtctctggtgacaggactctctaatcggacacttcatggctttgtgacttgtataattgaacaggaagctcatgtttatttccagtttgctctcaggaaagaaagcagtaatggggtgacagggaggatcctgttctttgaaggacatgctgagagggaatagtcggtgtgaggggccgtttagcctaatggtgaaatgcttagtcaactggaacctgactgcctggctccaaatgctggctttgccacatgtggcctgtggaaggtacgtagacatttgtgcctccgctgcctcatttataagttaatgacaggaagactacctacttctcagaggcatgatcagggataaataagtcaatgcccattaaaaaaaaaaataacagtacaggtgtacatgcccttacccaaaacccctggggccagatgtgtttcagaatttccatttcttcacatttcagaaaggtaacatgatgcatatacgatgttacataacaccccttagtaagctctgtaatcggctgtgttcatatttctgcagcaaaatgtatgaacactcgcaataagtgagattcaataaagaccagaaagggccttgtttcatttcaaatcaggttttgccaccaaaagagttaaaagaagctttctgcccttagagcattttggatgttggaatggcagataagggactatgaacaaatcagaaactaatatttagagcttatcatacacctcaggcatataatatttaatctgtacaatatctctgtgaactaggtattgttatccccattttactaatgggcatatcattatccctgttttacacatgagaaaattgaggtacaaagaggttaaagaatatcagccaagcgtggtgcctcatgcctgtaatcctagcactttaggaggccagggagagaggattgcttgagcccaggagttcaagaacagcctgggcaacatagtgagaccccatttcttaaaaaaagaaaaagaatatgcccagggtcacacagctaataagtggcagaaccaggattcaaacactggcaatctggccctagtgcctgggcagttgtccagcaggccatattgcctctctgcttagaagagtgcctgatgtgtattaagctctcaatagatgttaattattgctgtcatcaagaaagagaatattcagggccgagcacggtatctcacacctgtaatcctagcactttgggaagccaaggtgggaggtgggtggatcacttgaggtcaggagttcaagaccagtctggccaacatggtgaaaccatgtctctactaaaaatacaaaaattagccgggcgtggtcgtgggtacctgtaatcccagctatgcgggaggctgaggcatgagaatcgcttgaacctgggaggcagaggttgcagtgagtcaagattgtgccactatactgcgctccagcctgggcaacagagagagactccatctcaaaaaaaaagaaaaaaaaaaaaagaacgagaacattcagggacagtaacaggacagagagatcaggcattcattcagttttaggacggcttcataaaggaaaggacctttgggctgggacttgaaagataagaaagactgctaggcgaaagaaggaagccccacgtggagtgagcagcctttgcaagggtctggcaaaaaaaaaacctcctgaaaaacttgacattgatatggtagaagatacagataatattcaaatgaggaggatggaactagttttctattcttgctgtaacaaataatcacaaatttagctgcttaaaacaacacatttgttatcttacagttctgtaggtcagaagtcccacactggtctcagctgaaatcaaggtattggcagggttgcgttccttctggaggctctaggggaaaatccatttcctgctcattcaagttgttggcagaatccaattccttgagattgtaggactgaagtccctgtttccttactgtctgtcagctgacagccattcccagctttaagaggctgcccacagtccttgattctgagcctccttcctccatcttcaaagccaacaatggcaggttgagtccctctcacattttgaatctcccctgcctcttctgtcatcacatctctgagctacctttctttctccatcatctgcttttcagagctcatatgattagattgaatttcatcaaataatccagaaataatctccctgtcttagggtttgtaaccttaatttcatctgcaaagttcctttctgctatgtagtgtaaataacatacaggttccgaggattaggatgcggagcagggttggcatcatttggcctaccacagtctgccctctgacccccacagattcacatttgtttcacattcaaaatacattcacaccatcctaagatacccatgagttgtatcccatcacagggagcatcccaagcaagactggggagctagaagttagtctgggaaggtttagggaatgatggtagggtttgaagacagagatggagaaaagatgacaaaaaaaggaatcctcctcccgctgacctctgcccctcctatgtccacagcctctcaactcagctgtttgctctccagg

SEQ ID NO: 12 - DNA, 3120 bp, Homo Sapiens
aactttaagtttaggccgggcacagtggctcacgcatgtaatcccagtacttggagggaccgaggtgggcggatcacaaggtcaggagattgagaccatcctggccagcatggtgaaaccccgtctctactaaaaatacaaaacttagctgggcatgatggcacgtgcctgtagtcccagctacttgggaggctgaggcaggagaatcgcttgaacccgggaggtggaggttgcagtgagcggagattgcaccactgcactcgcctggtgacagagcaagactctatctcaaaaaacaaacaaagaaaacttgaagtatagtatccttttaaattttaaatagataatagaaactggtttccccccatttaaaccagaatttaagtttaactttatatattcttgacagtttggattttgtccttcaacctcataaaattgggaatttaagcatcacctggttcgatttaaatgcaatgtagaatttgcattaaaatactacattaaagcctcagatttgtagtagctaacagcacttctatgtatgtgtcagggactgctctaaatacttcatatatattaactcctctattctgtacttctgttcccgttttatacagcaggaaattgaaacactgagaggttaagtaactaaagttacagagctagagtgacaggagtaaagcttcaactcaggcaacccagacttccagagttctgatctccactactaagctgctagcatagcttttctggtaactatttttaattcaaatataattcgagtgatctatctaacaagtcatcactctgacaactcagtgacttgtaatgtaaaattattcattgtaattcatttaatattattgtttctctgtgctgcaaaaatcatagcaatcgagatgtaatttattactctccctcccacctccggcatcttgtgctaatccttctgccctgcggacctcccccgactctttactatgcgtgtcaactgccatcaacttccttgcttgctggggactggggccgcgagggcatacccccgaggggtacggggctagggctaggcaggctgtgcggttgggcggggccctgtgccccactgcggagtgcgggtcgggaagcggagagagaagcagctgtgtaatccgctggatgcggaccagggcgctccccattcccgtcgggagcccgccgattggctgggtgtgggcgcacgtgaccgacatgtggctgtattggtgcagcccgccagggtgtcactggagacagaatggaggtgctgccggactcggaaatggggtaggtgctggagccaccatggccaggcttgctgcggggggaggggggaaggtggttttccctcgcactgtcttaaaccgatggcctttccttggcacagggtccactgcagcatgccaaacgaggaggcaggggcgtcgtccccccgccccccactgcagcactggagatggatttcctgtacttcggatccagggtttttgacagaagaggaagaagggggaggggtagaagtgttaaggggagtctgctgagaaaagctgtttttgaagccagaaggggtttttgtttttataatgccatttgacagagtggaataacagtatctaaggaaacgggtagaggacaacaaagaatggagcatattcatggcgaggagcaaaagctctaccccattgaaaggcttcttttcctccctggcgacaaggacacatgcattggtggccaaaagagagaggagacaaaaccgctgcagatggctgatgtgaatctagtggaaagagctactggggatgagagaaagaggaggaggcaggtactgcagagcgtgagtggtggtgttggttggtgaaatactggtcaccagtagtgtgcctgcttttgtaaaacatctaagtaaactccctgtgaacagggtggcaaacagataccagtgtctttgttagttacaaaatgcagtggtagtggctttttgcggacgactgcagcagtgctttttctccctctgttaggccgaaaagacaactgcagaggaataagaaaccttgcagcaaatgctggggtagaagcccatttacaagaagccatagtttataaatgcagcctgaacagcagaaaaaaaattactgttttttaaagtaggaataatgtcaggctatgaatgttttgtcattggaatgtattggacactttgattctacatcacgaaagtgatgctcaaattctttgatttaacataaatcctatacgaaatcttaataaattatgtatgaaacagtggatcttttcttttgttagtgaagcttttatgccattaattaggtcattcaagagcaaaccactttacaacgtaaattactttgtcaaaaattatggtgaacaaatttttgtaggcctaatatttaagacctatagttaagtaattttatatttctctttggttgcttttagataacactgaataaatatttaagatattaattcagtgtgcaaatattttaaattaaagcaacatggcttttcttctagatgtatttctgtttagtgagtactcatgagatatactcttgatataaagtgtttttcattgagcttttttttcctttacctaaatgtaaaagcctatctttatgcatacttatagtagccagcctgccacacctccccactccctgaacaaggatggcagtggctttgtaaagccctccagggtcagtgacagtgtctcttaaataatgtttatgtaatagaaagtcttaagatgacctattatattgtttcagtaatattttcaagataatgcggaattgggctggcttagataaataagactacataagtttttcactgataaatttaaatagttctttaaaaaattatttctgctttaagaattacttgatcatggatatcagggttaatagtacttaggagccgggcgtggtggcccatgcctgtaatacaagctaaacaggaggctgagggaagctgaggcaggaggatcacttgagccttggcgttcaagaccagcctgggcaaccaagcaagaccctatctcaaaaaaaagtacttagagtctcttttttaaaatctgat

SEQ ID NO: 13 - DNA, 2501 bp, Homo Sapiens
tcacacggccagaaagggtccaggcggttcccggcgcttttccagcccttgttttcatggcgcaccctcccgccagccgcccccctccgcactccgtcgtccgcccggcccggccgcgtgcggttccccgggagcccccaccccgtcgcggaccccagcgaccaccaagtccgcacgcggcctgccgcaggcctgagcagaaggccccgcgcacacccaccgcgccgcggccgcgcgggaggcctgtgccgcccgcgccacccactggccgggccccgcgggcgcagcggagcgggcgggtggccggcccggacgcgccctccccggccgcggccccgcgcgccatgtgcccccggcgggacgcgccactcccgggcctgccgcggcgcctttaacccgggccagggagcggggcggagggggcggtcgggtggctcagaggagggctctttctttcttctttttttgaatgaaccgtgtgacgttacgcacaggaaaccggtcgggctgtgcagagaatgaagtaagaggacaggcaccacagccccgctcccgcccccttcctcccgcgcccgcccctccgcgccgcctgcccgcccgcccgccgcgctcccgcccgccgctctccgtggccccgccgcgctgccgccgccgccgctgccagcagaaggtgccggggctccgggccctccctgccggcggccgtcagcgctcggagcgggctgcgcggcgggagctccgggaggcggccgtagccagcgccgccgcgcaggaccaggaggaggagaaagggtgcgcagcccggaggcggggtgcgccggtggggtgcagcggaagagggggtccaggggggagaacttcgtagcagtcatcctttttaggaaaagagggaaaaaataaaaccctcccccaccacctccttctccccacccctcgccgcaccacacacagcgcgggcttctagcgctcggcaccggcgggccaggcgcgtcctgccttcatttatccagcagcttttcggaaaatgcatttgctgttcggagtttaatcagaagaggattcctgcctccgtccccggctccttcatcgtcccctctcccctgtctctctcctggggaggcgtgaagcggtcccgtggatagagattcatgcctgtgcccgcgcgtgtgtgcgcgcgtgtaaattgccgagaaggggaaaacatcacaggacttctgcgaataccggactgaaaattgtaattcatctgccgccgccgctgccttttttttttctcgagctcttgagatctccggttgggattcctgcggattgacatttctgtgaagcagaagtctgggaatcgatctggaaatcctcctaatttttactccctctccccgcgactcctgattcattgggaagtttcaaatcagctataactggagagtgctgaagattgatgggatcgttgccttatgcatttgttttggttttacaaaaaggaaacttgacagaggatcatgctgtacttaaaaaatacaagtaagttctctgcacaggaaattggtttaatgtaactttcaatggaaacctttgagattttttacttaaagtgcattcgagtaaatttaatttccaggcagcttaatacattctttttagccgtgttacttgtagtgtgtatgccctgctttcactcagtgtgtacagggaaacgcacctgattttttacttattagtttgttttttctttaacctttcagcatcacagaggaagtagactgatattaacaatacttactaataataacgtgcctcatgaaataaagatccgaaaggaattggaataaaaatttcctgcatctcatgccaagggggaaacaccagaatcaagtgttccgcgtgattgaagacaccccctcgtccaagaatgcaaagcacatccaataaaatagctggattataactcctcttctttctctgggggccgtggggtgggagctggggcgagaggtgccgttggcccccgttgcttttcctctgggaaggatggcgcacgctgggagaacagggtacgataaccgggagatagtgatgaagtacatccattataagctgtcgcagaggggctacgagtgggatgcgggagatgtgggcgccgcgcccccgggggccgcccccgcaccgggcatcttctcctcccagcccgggcacacgccccatccagccgcatcccgggacccggtcgccaggacctcgccgctgcagaccccggctgcccccggcgccgccgcggggcctgcgctcagcccggtgccacctgtggtccacctgaccctccgccaggccggcgacgacttctcccgccgctaccgccgcgacttcgccgagatgtccagccagctgcacctgacgcccttcaccgcgcggggacgctttgccacggtggtggaggagctcttcagggacggggtgaactgggggaggattgtggccttctttgagttcggtggggtcat

SEQ ID NO: 14 - DNA, 6104 bp, Homo Sapiens
tagccctgaagcaggcagacatgcccatatcttcctctgagtcagtgcctggatccaggggaccagacctcttacctgacatggcagagagataagctatgtttcaggtcctcaaaaggagcctggaaaatataattaattcaagccaaatactcttactattcccttgcatatacaacaaagataaaaatatctatcttattaaactgttgagagtaagaaagataatatacacacagtgcctggcacacggatggaacttagttgatggtagttataatatttataatatcttttctttgtttcaatttaatatgatttatatgacttttcatacttactgcacatgcaacatcttttagataattctatatctaggttattagtaaaacattgatatcctcttcagtatttatacagatgcccctcttctaaagtcttcagcaaaattcccactggggaatttcagctgtctctcactctttttttttttcacttttatttccatattaaaggtttttatttttaaggtatacaatatgatattttgatacatgtatactttgtgaaatgattgcaacaatcaagttaattaacatatcattacctcacatagtttcctgtgtgtgtgtgtgtgtgtgtgcgcttagagctcttgagatctactctctttgcaaatttcaagcatatgttaactatagtcaccaggctgtatattaggtctccagaacttactcatcttataactgaaaggttgtatcctttaactagtatttctcttttacccccaaccgcagccccaaataatcaccattctaacctttgttactgagttcgacttgttttttgagattctacatataagtgagatcatgtattacgtgtctttctgtgcctcacttattttgtgtgtcataatattccccaggttcagccatgttggcacaaatgacaatatttccttcttctgaataatactgctgactaatattccattgtgtgtgtgtgataaacacacaccacattttctttaataattcattcatcaatggacacttaggctgtttctgtatcttggttattgtgaatctcgctgtctctttggcagccatttctgtactcccttccccagaagcagctttactgcagtctaaaagtgtcttaggaaaatgattcagaagcaactacttctcttggcatgttcttcagtaaacacgatgatggaaagctttgatttctgcccttctttaaacagtgcaatcgattttcagttgggattttttccagttaatttgatagctccacgtttctaccaggctgaagaaaatgtatgtgttgtgggctgttgtattactgttgctggtggtgctgttgctactgctgagattttgtggttgagtccatattataaaggaattgtagagcagtaataaatttaacttgagctctgaactcaagccttcaggtgtgacttttttaatcacgtggaaattcacgtaagaattttcaaccagacttcatgtttatttttatttcttaagcaaagggtacaggaatctggtctaaacgaatgggaacaaacattacagttagactttattggagtgttgtaaaaatgtttttttccaaaatcagattgtttcaaaactgaccctggtttccagatttttaagttaggaagtaagacagtaaaaatcaagggtcaaatagtcaagcgactatttttttaaaatcagcattttccttggcgacttccgttagaccatgctctgtttagtactgaaactcagagaagttccaggaatagcgggatgaaatctaagtgatccgctcacgggaagctctacccttccttcgctcgctcagtaaatccgggatgggctcagagaatgacttcgcattttgcaccagaagatctcagtctttagagagaaccctagacgaaatccttacttccctgcctcattcctgaaaacttctacctgggaaccgacttgctgtgacaaataaaatgggaggagtctggctgaatagtttgtggatttcggaaagcaaagcgaaatgccgctctaactaggtccgaattttctgcaagctaccttgtgaaactggtgaatttgccagaatgaattttcattcatttaactttggcggatcgtctactagggtgcctggcatggtgctaattgctggagaaaatgattttcaaacaaaaacgaaaaaaactttcggcccccagcaaggagccaggcaattcctacaaactcaaggagtgcttgagaggtgagttaatgaccgtccctcctgtcctaaagagacagacttttacagtcagtcttgaaactgctcggggctacactagcgccctctggacgcagactctggttagcgccccacggcaccagcctttgatttgtagctgccaaagatttgatagtggggagtacgtgtctattctgaaggctgaagacacacaccacagtcaggagtagaattccgacccctcaaagtgacatggccacaaaatctgcgtctactggctttcattttgcggtcaccgtggcacgggcgaaagctatgaactctctctttaggaaaacacacatcacagacacacacacttacaaacggtttcaggaggttcttatgttagaaacctctggtcttggaaaaaaatcatttccgctgaagtatgtggtagctgagcgcaaatacccttctgctacagccccagtggcagaggcccaagcactacgccccactcagtgcccgcactgcggccttcgcaactcttcaagcagctctgcaccgaaaacccaggccggagatccgagcctaaactgctgaaaagctccaaggctccggacagggtctcagcaggggttatcttccttcaggatccggggctcattgtgcccaagatccgccatccaagccctgctctgcgcgcacgttgcctgtttcacgctctgcgctgacacgcgccggtgtcctcccgggccagttccagtcccgggtcctgtggccgccctgccggcgaccctgcggagagcgagtcttagatacccagtccccagccccgagttgttattccctcgctgtagttaagaaggaggagatcaattaagggcatcttagaagttaggcgttcccgctgcctcctttgagcacggaggccaccaaccccctagggggaagagatgtagcgcgaggcaggggtgtcgtgctaagaaatttcgacgcttctggggactgaggacaaaggtgcggacacgaccccggggtacctggagttccgtgactcgcgccacggacggcacacctaggggctaatttctgctctgcctcaaagaacctcaagctagagtccttgcctccgcccacagccccgggatgccgctgctgcgctcaccgcacaggcagcgcccggaccggctgcagcagatcgcgcgctgcgcgttccaccgggagatggtggagacgctgaaaagcttctttcttgccactctggacgctgtgggcggcaagcgccttagtccctacctctgctgagctgaacgctcaggcacagtggaactgaaacccggttctgcgggatgtgagagctgttgaggtcacgcgtaattgggtgtgatggagggcgcctgttcgtgatgtgtgcaggtttgatgcaagcaggtcatcgtcgtgcgagtgtgtggatgcgaccgcccgagagactcggaggcaggcttgggacacgtttgagtgaacacctcaggatactcttctggccagtatctgttttttagtgtctgtgattcagagtgggcacatgttgggagacagtaatgggtttgggtgtgtgtaaatgagtgtgaccggaagcgagtgtgagcttgatctaggcagggaccacacagcactgtcacacctgcctgctctttagtagaggactgaagtgcgggggtgggggtacggggccggaatagaatgtctctgggacatcttggcaaacagcagccggaagcaaaggggcagctgtgcaaacggctcaggcaggtgatggatggcagggtaggaagggggaggtccagaggtctggatggaggcttccgcatctgtaccttgcaactcacccctcaggcccagcaggtcatcggccccctcctcacacatgtaatggatctgaagagtaccccgggacagtccggggagatggagattcggaaagtatccatggagatcttacagaatcccctgtgcggaccaggaaactcttgtagatccctgcctatctgaggcccaggcgctgggctgtttctcacaatattccttcaagatgagattgtggtccccatttcaaagatgagtacactgagcctctgtgaagttacttgcccatgatcacacaaccaggaattgggccaactgtaattgaactcctgtctaacaaagttcttgctcccagctccgtctcttgtttcccacgagccctggccctctgtgggtaataccagctactggagtcagatttcttgggcccagaacccacccttaggggcattaacctttaaaatctcacttgggcaggggtctgggatcagagttggaagagtccctacaatcctggaccctttccgccaaatcgtgaaaccaggggtggagtggggcgagggttcaaaaccaggccggactgagaggtgaaattcaccatgacgtcaaactgccctcaaattcccgctcactttaagggcgttacttgttggtgcccccaccatcccccaccatttccatcaatgacctcaatgcaaatacaagtgggacggtcctgctggatcctccaggttctggaagcatgagggtgacgcaacccaggggcaaaggacccctccgcccattggttgctgtgcactggcggaactttcccgacccacagcggcgggaataagagcagtcgctggcgctgggaggcatcagagacactgcccagcccaagtgtcgccgccgcttccacagggctctgctggacgccgccgccgccgctgccaccgcctctgatccaagccacctcccgccaggtgagccccgagatcctggctcaggtatatgtctctccctccctctccctccattcgtcattttctcactccctttcctcctctccctctctctccgttagtctcttcatcagatagtctctgttagtccgcgatttataccaggctcgtgccctaggttggatcggacagtctcaatcccccggctcgctcttcctgctcggctgcggactccagtcttactctctcgcactgcacacaggcttaggccagtctcgggacactcaggctccccagggaccgcgcacagagcctgaggcaagagaaactttccgcagacggtgcgatcagggacggcgtctggagcccagcagtcccagggaaattggttcagaacctggaacagagcggatgggtggcaaataggcacgacgactgagggacaagcagccctaaactgcaagccccagtcacaggctctgggagcaaagagagaaagtcttgggtcccaatttaagagtaaaacttggttcctgcaggggactgaggtgccagcaggcggagcttaggctgagcactaaaattgattcttttatttctcagattccaattgcagagataatctctgtggatagatcccacccctcccaccaaggtgtatgcaaaagccccagaagaggaggacagctctgggtttccttatgggatcagcttctgtgacaggggcctgggagcatgtcctccacagagacctggctaacaggtttatatgtatctgtgtggctttggggagaagggtaggactgagacctcccccactcagctctccctctaggatcgctcctccagctctatcagactgtgcatgctacaggcccactgaacctcccagaagtccactgtgctgatgaggaaacaaaaaagaagagaaatataatgaccagtctgaagccacaaagccagagcgttagaagcaagacagaaaaccaggataggagccaaggtctgtgggctcctagaacttcgaactggcgcaggtggtttatctcattcttcccttgcaga

SEQ ID NO: 15 - DNA, 5976 bp, Homo Sapiens
agaggggcacctcccaccccaatctgaaccctatgactgcaccccttgccaggagatgaaagggacaagactgcctgaaggattaatctttagcctccaggcaggccagtggccaaaacacccaggaagtgaaagtctgtcctctgccataaggaaacctggagtctgtgatcccatcatgcggggtctgttatctgccaggtgacagggtctcttatctatctgcggtgatctgaagggcaaggcctctggccaaacatttcttttccccagtgatgcctgaaattccactgttagcgctggatctcagcaagatctcagagaaagctcaactcctggagtttgggttttccccagttgagatgttaggaaagcaatgggccttatcacctgcacggacaggtttgtgtacagtctcaggggattcagggaccccaccagagcccatccacagacaccaggttaaaagccctggacagcatttacaactcctttgaaagaagaaaagtctttctctagagccctctttaaagtgcaaatggccctgggaggttcgaaatgatgagctggccggcatgaaagaattttctccagtagatgcaagagataacctgaggagctttagtggcgggggtgggggaaggagagcctgggggaggggaggctccaggcagctcacaatttttcctagaactggaaagggaatgtattgggccaagagggctaatcactcacctttgcagagtgtttacaagaaccttatgaattaagtgctatcaacattcccattttacagatgaggaaaccaagatggtggagataaaatgacttatgcttctcaactaatggcagagccagaagtgaatccaggctggagtgaagtggctccagtgctcaaatgatcctcctacctcagcctccagagtagctgggactacaggcatgcactgccatgtccagctaattcaaaataatatttgttggggagatggggtttcaccatgttgcccagactggtctcaaactcctgggctcaagtaatcttctcacctcccaactagcctcccaaagtgctgcgattacagttgtgagccaccaggcctgcttaggtatccctgtttgatacaagagaaaacagagggcaggcacagtggctcacacctgtaatcccagcactttgggaggctgaggtaggtggatcacttgaggtcaggagtttgagaccagcctggccaacatggcgaaatcccgtctctactaaaatacaaaaattagccagacatggtgacgtgtgtctgtaatcacagctactcaggaggctgaggcacaagaatctcttgaacctgggaggcagagagtgcagtgagccgagatcgcgccattgcactccagccggggcaacagagcaagaccttgtcactaaataaataaataggaaacagagaagcaattcagtgtgttgcgaaagtcacacagcacctgtcttccacaaggagcccctctgtgttcccgcctcaccctggacacctgatctactgtctttggagcttggagaaggacttgccgagaagtctgaagaatgcatcaggcctgacctgactttgctgcccctaattgttttctaaaatcctttttattgaattatcagagtgtaatggaagagtcgatgagagtcgctgcagagttacgaggccaaggcttgctgggtagaagaaagtaaagccctaaaggctcccagggcccagcgatggtataaaatatgtatttttacataactgagaggaaaaaaataagcagacagtacagccccatgggggaaacgcctctttctgtatttccattatcttgttcaaggcacgatcctagtgggaaaggaaataccggagccttctccctctgagcctcctggtgggttaagagcagagggagccaaaatacgacatccaaaagacctgattggaaactcattaaaattgaggggacaggttgttggggggggcggtgctgggctgcccagaaatcgtctgcatttgagaaattacttgatggactcagaggcacctttagctctgggtgaaatattccaaacatggctttccccaggaggaagcgaaataggggctgggccttttgaaagagtaacccctactccaaatatttattgagcagttgctatgatgagccaagaactctgcttagcgattgtttttgtattagctcatgccaattcacttatacaaaggagaacactgacttccccaaggtcacagggctagtgagtggctgactccacttaatgctgtgtagttctaaccatgcttgaaggataaagggaaaggaggtgcccttgtcggggtagacaagccacccagacgtggctggccacagggagtcagacagggaagttgtctaacctaacatttgcctgtctattctgtttttgtcttttgatggaggacggcgggtgctggagggccactggcccaggacctgagacctttggcccctatctattctatttttgatcctaaaattatttcactggggacagaattctctggagaaggtgatggtggccatggtgtggctgtggcattaaaagccccactctgggggtcagaagatcctgggttttggtctttggctttgacattgacctgcctatgtgacattgaacaagttatttgcaaatcataggtttgggtgaactctaaaggtctcttccaggtcaacatcaaaaaacagactgaaaactgcagctccagctggaagactgggaccacatgagatgaagctgattgttagaagaaaggccctggaatcagagaggttggttccagtcctgcgccacctctcattggcctcaatctctctaagcttcagttgcccatctatcatatgggaataataatacagctcttgggttgttttgaaatgagcttaaatgagctggtcagtggctgggcacggtggctcatgcctgtaatcccagcactttgggaggctgaggcaggtggatcatctgaggacaggagttcaagaccagcctggccaacatgatgaaaccctgtctctactaaaaatacaaaaattagccagtcgtggtggcgcatgcctgtaatcccagctactcaggaggctgatagaggagaaccgcttgaacccaagaggcgaaggttgcagtgagccaagaacacaccattgcactccagcctgggcgacagagcaggactccgtctcaaaaaaaaaagagctggtcagtgtcaaatgcttagcacagagactggcacagtaatcttcaatgtccagcacctattgttactattttttttttttttttttttttgagacagagtcttgctctgtcgcccaggctggagtacagtggcgcgatctcggctcactgcaagctccacctcccaggttcatgccattctcctgcctcagcctcccgagtagctgggactacaggcgcccaccaccacgcctggctaattttttgtatttttagtagagacggggtttcactgcgttagccaggatggtctcaatctcctgacctcgtgatctgcccgcctcggcctcccaaagtgctgggattacaggcgtgagccaccatgcctggccctattgttactatttttacccctcacttctgtacagagcatttatggctcaagaaacatttgtcattttaattgtatgggagtcccacaacagcatagggagacatttctgatcattattcccattaggagggtggagaaactgaggctttgggaggtggtcctgacctagggaatcaatttgctgactcactaacccatgaagctctacagttaaaaaagactagattaaaaaatgagaactcagtaaaggggctgaggcaggaggatcgcctgagttcagaaatttgagatcagcctcggcaacatagtgagatcccctctctagaaaaattttttaaaaaattaggccgctcgaggcagagtgcagtggctcacgcctgtaatccaacacttcaggaggctgaagagggtggatcacctgaggtcaggagttccagaccagcctggccaacatggtgaaaccccgtctgtactaaaaatacaaaattagccggtgtggtggcacacgcctgtagtcccagctactcaataggctgagacaggagagtctcttgaacccggcaggcggaggttgcagtgagccgagatcgtgccactgcactccagcctgggcaagacagagcgagactccgtctcaaaaaatacaaacaaaacaaacaaacaaaaaattaggctgctagctcagtggctcatggctcacacctgaaatcctagcactttgggaggccaaggcaggaggatcgcttcagcccaggagttcgagaccaggctgggcaatacagggagacacagcgcccccactgcccctgtccgccccgacttgtctctctacaaaaaggcaaaagaaaaaaaaattagcctggcgtggtggtgtgcacctgtactcccagctactagagaggctggggccagaggaccgcttgagcccaggagttcgaggctgcagtgagctgtgatcgcaccactgcactccagcttgggtgaaagagtgagaccccatctccaaaacgaacaaacaaaaaatcccaaaaaacaaaagaactcagccaagtgtaaaagccctttctgatcccaggtcttagtgagccaccggcggggctgggattcgaacccagtggaatcagaaccgtgcaggtcccataacccacctagaccctagcaactccaggctagagggtcaccgcgtctatgcgaggccgggtgggcgggccgtcagctccgccctggggaggggtccgcgctgctgattggctgtggccggcaggtgaaccctcagccaatcagcggtacggggggcggtgcctccggggctcacctggctgcagccacgcaccccctctcagtggcgtcggaactgcaaagcacctgtgagcttgcggaagtcagttcagactccagcccgctccagcccggcccgacccgaccgcacccggcgcctgccctcgctcggcgtccccggccagccatgggcccttggagccgcagcctctcggcgctgctgctgctgctgcaggtaccccggatcccctgacttgcgagggacgcattcgggccgcaagctccgcgccccagccctgcgccccttcctctcccgtcgtcaccgcttcccttcttccaagaaagttcgggtcctgaggagcggagcggcctggaagcctcgcgcgctccggaccccccagtgatgggagtggggggtgggtggtgaggggcgagcgcggctttcctgccccctccagcgcagaccgaggcgggggcgtctggccgcggagtccgcggggtgggctcgcgcgggcggtgggggcgtgaagcggggtgtagggggtggggtgtggagaaggggtgccctggtgcaagtcgagggggagccaggagtcgtggggacgatcttcgagggaaggagaggggcatccgtagaaataaaggcacctgccatgccaagaaaggtcgtaaataggagtgagggtcccggggataagaaagtgaggtcggaggaggtgggagcgcccctcgctctgaggagtggtgcattcccggtctaaggaaagtggggtactggagaataaagacatctccaataaaatgagaaaggagactgaaagggaacggtgggctaggtcttgagggggtgactcggcggccccctcccgggagttcctgggggctcggcggccgtaggtttcggggtgggggagggtgacgtcgctgcccgcccgtcccggggctgcgggctggggtcctcccccaatcccgacgccgggagcgagggaggggcggcgctgttggtttcggtgagcaggagggaaccctccgagtcacccggttccatctacctttcccccaccccagg

SEQ ID NO: 16 - DNA, 2501 bp, Homo Sapiens
cagaagtcctcccttagagtgtgtctgggtacacattcaagtgcatggttgcaaacttttttttttaaagcactgaatagtactagacacttagtaggtacttaagaaatattgaatgtcgtggtggtggtgagctagaagttataaaaaaaattctttcccaaaaacaacaacaaaaagaattatttcattgtgaagctcagtaccacaaaaatttaaataattcattacaagcctttattaaaaaaaattttctccccaaagtaaacagacagacaatgtctagtctatttgaaatgcctgaaagcagaggggcttcaaggcagtgggagaaggtgcctgtcctctgctggacatttgacaaccagccctttggatggtttggatgtataggagcgaaggtgcagacagcagtggggcttagagtggggtcctgaggctgtgccgtggcctttctggggtttagccacaatcctggcctgactccagggcgaggcaggccaagggggtctgctactgtgtcctcccacccctacctgggctcccatccccacagcagaggagaaagaagcctgtcctccccgaggtcagctgcgttagaggaagaagactgggcatgtctgggcagagatttccagactctgagcagcctgagatgtcagtaattgtagctgctccaagcctgggttctgttttttagtgggatttctgttcagatgaacaatccatcctctgcaattttttaaaagcaaaactgcaaatgtttcaggcacagaaaggaggcaaaggtgaagtccaggggaggtcaggggtgtgaggtagatgggagcggatagacacatcactcatttctgtgtctgtcagaagaaccagtagacacttccagaattgtcctttatttatgtcatctccataaaccatctgcaaatgagggttatttggcatttttgtcattttggagccacagaaataaaggatgacaagcagagagccccgggcaggaggcaaaagtcctgtgttccaactatagtcatttctttgctgcatgatctgagttaggtcaccagacttctctgagccccagtttccccagcagtgtatacgggctatgtggggagtattcaggagacagacaactcactcgtcaaatcctccccttcctggccaacaaagctgctgcaaccacagggatttcttctgttcaggtgagtgtagggtgtagggagattggttcaatgtccaattcttctgtttccctggagatcaggttgcccttttttggtagtctctccaattccctccttcccggaagcatgtgacaatcaacaactttgtatacttaagttcagtggacctcaatttcctcatctgtgaaataaacgggactgaaaaatcattctggcctcaagatgctttgttggggtgtctaggtgctccaggtgcttctgggagaggtgacctagtgagggatcagtgggaatagaggtgatattgtggggcttttctggaaattgcagagaggtgcatcgtttttataatttatgaatttttatgtattaatgtcatcctcctgatcttttcagctgcattgggtaaatccttgcctgccagagtgggtcagcggtgagccagaaagggggctcattctaacagtgctgtgtcctcctggagagtgccaactcattctccaagtaaaaaaagccagatttgtggctcacttcgtggggaaatgtgtccagcgcaccaacgcaggcgagggactgggggaggagggaagtgccctcctgcagcacgcgaggttccgggaccggctggcctgctggaactcggccaggctcagctggctcggcgctgggcagccaggagcctgggccccggggagggcggtcccgggcggcgcggtgggccgagcgcgggtcccgcctccttgaggcgggcccgggcggggcggttgtatatcagggccgcgctgagctgcgccagctgaggtgtgagcagctgccgaagtcagttccttgtggagccggagctgggcgcggattcgccgaggcaccgaggcactcagaggaggtgagagagcggcggcagacaacaggggaccccgggccggcggcccagagccgagccaagcgtgcccgcgtgtgtccctgcgtgtccgcgaggatgcgtgttcgcgggtgtgtgctgcgttcacaggtgtttctgcggcaggtgaatgacgggcgtgggtcggtgcgcgctcggcttgcgcacacggtgtctctaagtgcgcgggtgacgagagtcgggatgtgccggagaccccggggcggagagcgggattacaagtacaggaatccctggtcacgctccccgcccctggaaacccagctggggcgagggagggcgtggacgggaccgttctgggagctcgcctttggctgcggttggctccaggccccaggcgcagtttgctcgcggcgtggggatgaagtccgtgtccctggaggggcccaggaagg

SEQ ID NO: 17 - DNA, 3486 bp, Homo Sapiens
aactaaagaggatgagacctcttgcttgatcctaggtgaattcttttctgtcagttaggtaggaagtcctgacttgaaaactagttctgggcactgccccctttactgttctctgggtatcaacccctgtccttcaattttagttgaactagtggatggtgataccacaggctcaagacagctgcatttaaatatcagtgaccacaggccacatcaaggaaacatctgcaggcaacccagggcctgggaaggagccattttcagtcacttgtaagacagcaggacctgcagactacagcacaatcaaactcagacaaaaccctgaaccagtgagaaccattaggaaggaaaggaacagaaaatgaaccaacctgagtgttaggagacttgcatctagtcctgactccggtaccaaccgaatgcatgtccctggacaggaaacctctctgagtctcgatttcctccgtggtaaaaaggagagggttaaaccacagggtcccgagggtcccttccagctgtcacattctggagcgtatgagatgaggtaggcacacaaagtggacaagatgtggctaagaaaacaagctacacatcaagctcatctgtagcataggtgcttaagaaaactttgctgctgtgtaatattagaacggaaggttggtttccagtaaaatgcattaactttggctcaaaccaagatgatgggtaccgggcatgggggtggggaggcagttgaagatccactgagctttgtctcagggcagccctgctcatcgtcctactttaccttccaccacggtgctcaagcccacactgagagagaaatttccagctgcaaaagggagaagagaaacgctggaatactagtatcggacgttaggacatggttgtggtgttttaaaaatcatttcatcatctggagtttgaccccgaggggagtattttcacccttcagccctctgaaagcattcactagcatctgaatattgttctgagtttgttggagcagtgaaatctggtgagagagaagggtggaggaaggaaggagctgttgtatttggcggctggactcaggtagaggaaactgctacaatcccgggaaagaacagaaaagtagaaagggacgagttcccacacgcagccaatgtccatggccttaactgtgcttgggaaggaagatcctgggccaggggtgtaccctcgtttttcaaaactaaacgtgtctgagacagctacaaagtttattaagggacttgagagactagagttttttgttttttttttttaatcttgagttcctttcttattttcattgagggagagcttgagttcatgataagtgccgcgtctactcctggctaatttctaaaagaaagacgttcgctttggcttcttccctaggcccccagcctccccagggatggcagaaacttctgggttaaggctgagcgaaccattgcccactgcctccaccagcccccagcaaaggcacgccggcgggggggcgcccagcccccccagcaaacgctccgcggcctcccccgcagaccacgaggtgggggccgctggggagggccgagctgggggcagctcgccaccccggctcctagcgagctgccggcgaccttcgcggtcctctggtccaggtcccggcttcccgggcgaggagcgggagggaggtcggggcttaggcgccgcggcgaacccgccaacgcagcgccgggccccgaacctcaggccccgccccaggttcccggccgtttggctagtttgtttgtcttaattttaatttctccgaggccagccagagcaggtttgttggcagcagtacccctccagcagtcacgcgaccagccaatctcccggcggcgctcggggaggcggcgcgctcgggaacgaggggaggtggcggaaccgcgccggggccaccttaaggccgcgctcgccagcctcggcggggcggctcccgccgccgcaaccaatggatctcctcctctgtttaaatagactcgccgtgtcaatcattttcttcttcgtcagcctcccttccaccgccatattgggccactaaaaaaagggggctcgtcttttcggggtgtttttctccccctcccctgtccccgcttgctcacggctctgcgactccgacgccggcaaggtttggagagcggctgggttcgcgggacccgcgggcttgcacccgcccagactcggacgggctttgccaccctctccgcttgcctggtcccctctcctctccgccctcccgctcgccagtccatttgatcagcggagactcggcggccgggccggggcttccccgcagcccctgcgcgctcctagagctcgggccgtggctcgtcggggtctgtgtcttttggctccgagggcagtcgctgggcttccgagaggggttcgggctgcgtaggggcgctttgttttgttcggttttgtttttttgagagtgcgagagaggcggtcgtgcagacccgggagaaagatgtcaaacgtgcgagtgtctaacgggagccctagcctggagcggatggacgccaggcaggcggagcaccccaagccctcggcctgcaggaacctcttcggcccggtggaccacgaagagttaacccgggacttggagaagcactgcagagacatggaagaggcgagccagcgcaagtggaatttcgattttcagaatcacaaacccctagagggcaagtacgagtggcaagaggtggagaagggcagcttgcccgagttctactacagacccccgcggccccccaaaggtgcctgcaaggtgccggcgcaggagagccaggatgtcagcgggagccgcccggcggcgcctttaattggggctccggctaactctgaggacacgcatttggtggacccaaagactgatccgtcggacagccagacggggttagcggagcaatgcgcaggaataaggaagcgacctgcaaccgacggtaatgaccctttcccaaccatagaatgtgtttggggccccgctttgcctgctggagggtgttaaccttagcttgcttttcggcgtattctgatttagctttgggagagctaactttattggtcttaggtgttcagtgctacctggcccactgcttgtctgtttgtgacttttaagtcagaaactggagatggtaagatccgataatttccctaacttaatacatcgcggtccctctcactagcaactcctaggtatgtgacaaagttgggatgtttatcaacggtccgcctcctggctagggaaagagctctggggcggagaatgcactttctgttttttgaaaacaacctcattttgtgcccttaaaagccactggggatgacggatccaggattgtgggtggaggtagtgggtttttcatcccctgactatggggccaacttctgccagccattgttttttctaataaagattgtgtgttctttttaaaaatttcccctgcgcttaga

SEQ ID NO: 18 - DNA, 8666 bp, Homo Sapiens
ctgcagggctttctttagtttaaagaaagtaatcaggtgtccctactgtgtcatgatctccaccctcagctgggttctccagtctggttttaaagaacaaaacaaaaggcttctctgtctgagtcttactcaacccatcctctctactcataagaggtattccaaacctttacgattctcaaacttcctaaccgaccatcttattttcactctgcaaacaagctaacctcctcattcatagaaggaagtgcctcaacttcctccccgttctgaccttttctccctcccaaatctatgtatctcttgtgacaaaatctataaccaccgctgtactttgagttctatttcttcattatttttgagggacctcaagtcctcaaaaatatcctatcttgcctgtgtacttaacttttcttttattcttttctaactttcccttctcttcacttggcacttgcccttccaggtatatgtgtgctcaggtctcctccaccttccatctgcctcacttcatggcatagggccttgaactatcacaaccaagctatgaaagagtagtcaacgcagtgtccccacttccttgccatcccattatcctagtttttcttttggctctctgaggagtccttcacaggctggttttcaggaataagtctaaatgaattactttcagttttcctaaacttctatgcctttgcacatcctcttacctctgcctagaatatctttctccttcttttccatctttaaactctcacatcattcttcaagactgggatcagctctcagcatccggaagcctttgcctactagagacaaatgagaatgagtttggtcaccttttcattttcttgtatcattctgtgctttattttgctcttctaagagcattacatgcttcatttaatccctaaacaactgtttgaggcaagtacagttattatcctaatcatgcaaatgagaaaacagaggcccagacatgttgagtaactttgataaaagttaaagaaccaataagtggaacagttgaggtttgaaccctggcagtctgactgtagagatactatgtttgacctactcccctctgcccccaccccatgtctgcccttagtttctgagcttgttgaatgaatgaacaggtggtagtctttttttgttataagactgatcagaattaagacaggtttaaatttcacgtgtagaattttcaaaactgcaaaggcagtgcaaatctaaaaaaagaatggcattctcaggaaagaggaaaagtaagtgtgagaataataataacaataaccaacaaactttagtaaatttagtaaatgtagtaaatttttacattaaaagcttttggacatacattatcatattttatggccacatgaaatatattataatcccattttgcacataggaaatctgagactggcataaggagcacagagatccaggactttatattttcattcttctaggattttgcacctcaggtcgatatgtatgagtaaactgggagtataatgggctctttaacagaaaaactaggaaagttttcccactattattaattatttacataatatttttttaattttattattatttatactttaagttttagagtacatgtgcacaatgtgcaggtttgttacatatgtatacatgtgccatgttggtgtgctgcacccatcaactcatcatttagcattaggtatatctcctaatgctatccctcccccctcccccctacataagatttataatggataatggacttcaatttctagagcaaaatggccccacccaaggatgccataatccttccagagctctactgcaagatatgagatatacatatctaaaacttgttcttggtatttccaaagcagtcaacttttacacctgtttataatgcatccaaatgttgtttttatatggttgcatctcccatcttcttcaccaatagctatatatatttttcacaagagctgaaagagttcttgatgtaggaatccatggtagagtttcagagaaatccctgaattcactgaaagttttatctagaaatacatgtgcaagtgaacacatcttttttaaaaaaaatcattacctactttcttttttgagaagaaggtatttatttcaacagactcttgaaggagcctactcttcccactctcccacccccattaagaaccactgtaggccgggcacgatggctcatgcctgtaatcccagcactttgggaggctaaggtgggtggatcacctgaggtcaggagttcgagacaagcctagccaacatagtgaaaccccgtctctactaataatacaaaaattagctgggtatggcagcatgtgcctgtaatcccagctactcgggaggctgaggcaggagaattgctcgaacccgggaggcggaggttgcagtgaaccgagagagatcgtgcggtgccatttcactccagcctgggcaacagagcgaaactccatctcaaaaaaacacacaaaacaaacaaacaaaaagaaagaaccattgtattagtgatggaaatgtgttccctccctcccatcctggcaaccactttcttcctcctccatcataaaatatcttaaactaaactaaaataattttatttatcgatagtttgaattttccctatcattgctacacagctaattgagaggtaccccgaggaaaatataaatggtacagtaatgcattgtagattttaataacatacttgacatcccaaattgttttcattggcttcattttaaaaactacatgttttaaaatcaagcagacactaaaagtacaagatatactgggtctacaaggtttaagtcaaccagggattgaaatataacttttaaacagagctggattatccagtaggcagattaagcatgtgcttaaggcatcagcaaagtctgagcaatccattttttaaaacgtagtacatgtttttgataagcttaaaaagtagtagtcacaggaaaaattagaacttttacctccttgcgcttgttatactctttagtgctgtttaacttttctttgtaagtgagggtggtggagggtgcccataatcttttcagggagtaagttcttcttggtctttctttctttctttctttctttttttcttgagaccaagtttcgctcttgtctcccaggctggagtgcaatggcgcgatctcggctcactgcaacctccgccttctcctgggttcaagcgattctcctacatcagcctccgagtagctgggattacaggcatgcgccaccaagccccgctaattttgtattttttagtagagacagggtttcgccatgttggtcaggcttgtctcgaactcctggcctcaggtgatccgcctgtctcggcctcccagaatgctgggattatagacgtgagccaccgcatccggactttccttttatgtaatagtgataattctatccaaagcatttttttttttttttgagtcggagtctcattctgtcacccaggctggagggtggtggcgcgatctcggcttactgcaacctctgcctcccgggttcaagcgattctcctgcctcagcctcctgagtagctggaattacacacgtgcgccaccatggccagctaatttttgtatttttagtagagacggggtgtcaccattttggccaagctggcctcgaactcctgacctcaggtgatctgcccgcctcggcttcccaaagtgctgggattacaggtgtgagccaccgcgtcctgctccaaagcattttctttctatgcctcaaaacaagattgcaagccagtcctcaaagcggataattcaagagctaacaggtattagcttaggatgtgtggcactgttcttaaggcttatatgtattaatacatcatttaaactcacaacaacccctataaagcagggggcactcatattcccttccccctttataattacgaaaaatgcaaggtattttcagtaggaaagagaaatgtgagaagtgtgaaggagacaggacagtatttgaagctggtctttggatcactgtgcaactctgcttctagaacactgagcactttttctggtctaggaattatgactttgagaatggagtccgtccttccaatgactccctccccattttcctatctgcctacaggcagaattctcccccgtccgtattaaataaacctcatcttttcagagtctgctcttataccaggcaatgtacacgtctgagaaacccttgccccagacagccgttttacacgcaggaggggaaggggaggggaaggagagagcagtccgactctccaaaaggaatcctttgaactagggtttctgacttagtgaaccccgcgctcctgaaaatcaagggttgagggggtagggggacactttctagtcgtacaggtgatttcgattctcggtggggctctcacaactaggaaagaatagttttgctttttcttatgattaaaagaagaagccatactttccctatgacaccaaacaccccgattcaatttggcagttaggaaggttgtatcgcggaggaaggaaacggggcgggggcggatttctttttaacagagtgaacgcactcaaacacgcctttgctggcaggcgggggagcgcggctgggagcagggaggccggagggcggtgtggggggcaggtggggaggagcccagtcctccttccttgccaacgctggctctggcgagggctgcttccggctggtgcccccgggggagacccaacctggggcgacttcaggggtgccacattcgctaagtgctcggagttaatagcacctcctccgagcactcgctcacggcgtccccttgcctggaaagataccgcggtccctccagaggatttgagggacagggtcggagggggctcttccgccagcaccggaggaagaaagaggaggggctggctggtcaccagagggtggggcggaccgcgtgcgctcggcggctgcggagagggggagagcaggcagcgggcggcggggagcagcatggagccggcggcggggagcagcatggagccttcggctgactggctggccacggccgcggcccggggtcgggtagaggaggtgcgggcgctgctggaggcgggggcgctgcccaacgcaccgaatagttacggtcggaggccgatccaggtgggtagagggtctgcagcgggagcaggggatggcgggcgactctggaggacgaagtttgcaggggaattggaatcaggtagcgcttcgattctccggaaaaaggggaggcttcctggggagttttcagaaggggtttgtaatcacagacctcctcctggcgacgccctgggggcttgggaagccaaggaagaggaatgaggagccacgcgcgtacagatctctcgaatgctgagaagatctgaaggggggaacatatttgtattagatggaagtatgctctttatcagatacaaaatttacgaacgtttgggataaaaagggagtcttaaagaaatgtaagatgtgctgggactacttagcctccaattcacagatacctggatggagcttatctttcttactaggagggattatcagtggaaatctgtggtgtatgttggaataaatatcgaatataaattttgatcgaaattattcagaagcggccgggcgcggtgcctcacgccttgtaatcccttcactttgggagatcaaggcggggggaatcacctgaggtcgggagttcgagaccagcctggccaacaggtgaaacctcgcctctactaaaaatacaaaaagtagccgggggtggtggcaggcgcctgtaatcccagctactcgggaggttgaggcaggagaatcgcttgaacccgggaggctgaggttgtagtgaacagcgagatggagccacttcactccagcctgggtgacagagtgagactttgtcgaaagaaagaaagagagaaagagagagagaaaaattattcagaagcaactacatattgtgtttatttttaactgagtagggcaaataaatatatgtttgctgtaggaacttaggaaataatgagccacattcatgtgatcattccagaggtaatatgtagttaccattttgggaatatctgctaacatttttgctcttttactatctttagcttacttgatatagtttatttgtgataagagttttcaattcctcatttttgaacagaggtgtttctcctctccctactcctgttttgtgagggagttaggggaggatttaaaagtaattaatacatgggtaacttagcatctctaaaattttgccaacagcttgaacccgggagtttggctttgtagtcctacaatatcttagaagagaccttatttgtttaaaaacaaaaaggaaaaagaaaagtggatagttttgacaatttttaatggagaagggagaagaacatgtagaaaaggggaaatgatgttggcttagaatcctaactacattggtgtttaatataggaacatttatttatataacattttaaagtactaaattcatattagtatattatcaaatggatatattatcaaatgggtttaagcatcctacacattttaattcaattgattcattttctttttgctttggatttctatcatgatttaaatatttacatatgggttactttttagatttttcatactatgaaatataagaaaaacctttaaggctagttttatgaccaagacgaaggacttcattgaatacacaaaacaataaatatactgcaacattttgtctttctttttgtagctgcaatttggtttgcttatactttctctttgtctctttgaaaactgagtcagtttcactttctcaggacaggatttaataaccataatataatttagtataattccttgatttaggcaaattatgcaatttgtgtttagtatgaaatgtacctaaaaataagtaactcctctttaacaccaccatcctcaaactaatataacaaataacagttatcctaaaataaattgtctacttccaccatgcagcactcaaattttaaggttgctatgactgcagacagtattttaaaattcctctctggaaatggctttgtttccaagatgatttaggaaccaaagaggtgaccatctcttgtttaatgaactctcaaatcataaacctgggaagtgttttagtttcctactgctgctgttacaaattatcacaaatgtgttagctaaaacaaacacaaaattattattttacagttctagagatcagaagtcaaaaatgggtccacaaggtttcattccttttggaaactctaaggggcaatctgtttccttgtcttttccagcttctagtgaccatcaaattccttggctcatggtctctgtattttctctgtggcctgtgcttccattcttgtatcttctctctgactgtgaccctctaataaaaacacttggggttatgttgggcccaccctgaaaattctggataatctccctcaagaccattaattaaatcacatctgcaaagcctcttttgccacataagttaatgtattaaaagtttttgaggattaggacatagacattgggggtgggggggcattattcagcctaccacaggaaggaattttagggttaattaaactagccttcttattttatacttgaagaaattgaagttttggaattggagagcattatgctaaatgaaataagccaaacacagaaagacaaatatcacatgttctcacttatctgtgaaatataaaacaattacattcttagcagtaaagagtagaatggtggttactagagctggggggtgggaggaatggggagatggtaatcaagatataaagcctcagttaagatgggaggaataagtttgattgttttttttgagatgtgtttcatagcatgatgaatatagctaaatagtaaatcccaaatgctctcatttgacaaaaatgtcaaatatttgagatgatggataggttacttagcttgacttaataattccccattgtgttcaaagatcataacttcatattgtaccacataaatatatacaactgtactatcccaatatataattttaaaactaatataatgaaaaagaaattgaagttcaacattcccagaagctaagtgtaacttaaaagttttgtgagaatttgttttaacaaacaaacaagttttctctttttaacaattaccacattctgcgcttggatatacagcagtgaacaaaaaaaaaaaaaaaaaaaaaaatctccaggcctaacataatttcaggaagaaatttcagtagttgtatctcaggggaaatacaggaagttagcctggagtaaaagtcagtctgtccctgcccctttgctattttgcccgtgcctcacagtgctctctgcctgtgacgacagctccgcagaagttcggaggatataatggaattcattgtgtactgaagaatggatagagaactcaagaaggaaattggaaactggaagcaaatgtaggggtaattagacacctggggcttgtgtgggggtctgcttggcggtgagggggctctacacaagcttcctttccgtcatgccggcccccaccctggctctgaccattctgttctctctggcagg

SEQ ID NO: 19 - DNA, 2501 bp, Homo Sapiens
gaaaaccaggttgagcaggttggtttttcaaagaaattcattgagcttccataatgtcctttctatttgacgggagaaaaggggctttggaagatcaagtgtgaagctttagaattctgtctggagctggttaggaccacccaggcctgagtataagcaaagcgctgtccgtggtgctagtaagcgcgaatgcccccggcaacgttttccctacccaaagttgtttttcattcagtcaacttgcttcgcgaagctcacacatctgcctcgtgcaagattctcagtcattttacttagtcattggttctttccctatcaccattctttatgtccccctcaaagaaaaacattatcttccatttccttatcaactccaaacagctttcatttttctgacatatttactacctaagaaaatggctcaagaattgggtcagactatcttgtcctaacttttctgataagtttcagagaaactcaaaggtcaaaacaagagcataagagtaaaaggtagagaaattaagaaactgaagactaggaaatgggggttggatgggaaagaaaaagaaattgttattaatgctacccggttcccttccctgtccaggtggatttcagctctgttgaggctctgtcagtagattttcagccctaaccagcacttccatggtggtggcacttccactgcctttaaaagaaagagctttttttaattctacagggatttgggggatgaggagtcagagctaaggtatcctaaaaaaaacatgtgaagactctcattttgcaatacacaagcaattgccctcctgttaagactttgtcttcctcagcactccgaaccaaaatgattctgtaaacaaaaactgttcacttttaggagaggtccacttatgcagttcctcaccaaagtttttaggcaacaaatccataacttgcggttctcttcctatccaatgtagcatccgctgaaatgttttaaatattttaagtaataaatgttgattcaaactcacctaggaagattaggaaggggaaaaaaagcacttggcatttaaatcttcagaagagaatttaatgacaggttcagcctgtttaatgacaagcccagcaccacacccctctcttatgatgtttcattattactgcataaatttcctttattactcatgataaataaaaataagatacctgacaaagtgggtttaaataggtaagagtgcaaacaaagatttactgtacaaatatgatgaaactgggatctcagattcttaaagtataatttttttttgtcttatgtgtgccaggttgccactctcaatctcgaactagtttttttctcttttaagggttgtatccataatgcaaaaatggaaagaattaaaaagcacacgcaaaacatgattctcgggatttttctctatttttatggttgactaattcaaacagaaagacacatccaagagaaaattgctaagtttgatacaagttatgaaacttgtgaagcccaagtactgcctggggatgaatttaacttgtatgacaggtgcagagctgtcgctttcagacatcttaagaaacacggagttattttgaatgactttctctcggtcacaagggagccaccaacgtctccacagtgaaaccaactggctggctgaaggaacagaaatcctctgctccgcctactggggattaggagctgagggcagtggtgaacattcccaaaatattagccttggctttactggacatccagcgagcagtgcagccagcattcctggcggctccctggcccagtctctggcgcatgcgtcctagcatctttgggcaggcttccccgccctcgtgacgcgtcggcccgggcctggcctcccggcgatcacagcggacagggggcggagcctaagggggtggggagacgccggccccttggcccagctgaaaacggaattctttgccggctggctccccactctgccagagcgaggcggggcagtgaggactccgcgacgcgtccgcaccctgcggccagagcggctttgagctcggctgcgtccgcgctaggcgctttttcccagaagcaatccaggcgcgcccgctggttcttgagcgccaggaaaagcccggagctaacgaccggccgctcggccactgcacggggccccaagccgcagaaggacgacgggagggtaatgaagctgagcccaggtctcctaggaaggagagagtgcgccggagcagcgtgggaaagaagggaagagtgtcgttaagtttacggccaacggtggattatccgggccgctgcgcgtctgggggctgcggaatgcgcgaggagaacaagggcatgcccagtgggggcggcagcgatgagggtctggccagcgccgcggcgcggggactagtggagaaggtgcgacagctcctggaagccggcgcggatcccaacggagtcaaccgtttcgggaggcgcgcgatccaggtagctggggccccagggc

SEQ ID NO: 20 - DNA, 2501 bp, Homo Sapiens
gtgttctagctcctgaatccatgctgttcgtcactacactgtactgcctgtggatgacttacttgtccctgtagtttcatctgaagaattcctcctccttttcctttgaggcctgcctcaaatatcacttcccctgtgaagactgcctggtgttctccaggagagagtgtgactcccttctctaggaatggtagcaccccaaacacacacattttgcagcatatttcaccttgcatggtaatggcctgcttgtgagttttattccgtaccagagggtgagggctctgaagatagcgccaggtcttatttacctcgataccccacaacactcattacatgtctgatgaatgaatgcatagggggatggctgggtgcatttctctcaacttttcaatttcttgaaataaataacaaaatcttaccttccctcagaagtcctggcatggttcctttcatcttgccacagccactgataatcactttcattttctgtgtaactcaccaggcaagaagtccatgcagatttacttttagtagttcacatgacaaataaatactgcgtttgatttccaaacattaaaccatagtatattatagatagatatagagttatcattcaaagtatgatatttcaatctcaaaaggcttcccctgaagaatattacaaactcttcctctctttaagatctgctgggtaggaaagatgggagaaaatgaattaatgtttacacagaaaggaggataatgggggcaaaaataatagatgaacgtatgggtggatgagagaatggataaaatgataggtggatatgttgatcttggacagatgggaaatgagtggatatatcaataaacagatatgtgggtggatgggtggagaagaggatggtggatggttgtggttttatgaagagatgtgaaaaaggaagtgtggaatgatggatgagaagttgtatgggaagatgaatagaagaataggtggttgaataaattaaaaggtgtgtggttggatgaatgaatgagtgggatgatagatggacctaagtggttagtggatggacaggaggatggatggatgtgagagccccagaaggacataaggaaagatgggtggatagatggatgggcggatggaaggatatttaggaggatgaatgagcatgtgtgtggagagaggtgcccattcacactggcttgaacacatgggttagctgagccaaatgccagccctatgacaggccatcagtagctttccctgagctgttctgccaagaagctaaaattcattcaagccatgtggacttgttattgaggggaaaaagaatgagctctccctctttccacttggaagattcaccaactccccacccctcactccccactgtgggcacggaggcactgcgccacccagggcaagacctcgccctctctccagctcctctcccaggatatccaacatcctgtgaaacccagagatcttgctccagccggattcagagaaatttagcgggaaaggagaggccaaaggctgaacccaatggtgcaaggttttacggttcggtcatcctctgtcctgacgccgcggggccagcgggagaagaaagccagtgcgtctctgggcgcaggggccagtggggctcggaggcacaggcaccccgcgacactccaggttccccgacccacgtccctggcagccccgattatttacagcctcagcagagcacggggcgggggcagaggggcccgcccgggagggctgctacttcttaaaacctctgcgggctgcttagtcacagccccccttgcttgggtgtgtccttcgctcgctccctccctccgtcttaggtcactgttttcaacctcgaataaaaactgcagccaacttccgaggcagcctcattgcccagcggaccccagcctctgccaggttcggtccgccatcctcgtcccgtcctccgccggcccctgccccgcgcccagggatcctccagctcctttcgcccgcgccctccgttcgctccggacaccatggacaagttttggtggcacgcagcctggggactctgcctcgtgccgctgagcctggcgcagatcggtgagtgcccgccgcagcctgggcagcaagatgggtgcggggtgctcagcgcggacccggcggcagcccctccggctgagtcggccctgggggactggagtcaagtgagctgtctgcgaagtgcattgggctccggaaagcagggctgggatttgcgctaaaccgttggagaatgtgtctgtggaagcaccatttggttgaaagaaaaagagaaagagaagaaagtttgttgggcaggctgccggcgcgcagttttgggcgaggtcgctagagctgcagcacatggcagaaagtaaccgttctcccggatgcgcacagtcgttgtctggactaacaggctcctgtgcccaagggctcgccaagccccaccgggctgtgtctaggcagggcagagctgggcggggca

SEQ ID NO: 21 - DNA, 16579 bp, Homo Sapiens
tgttttttaaaatgatgtctagctgaaccagccaatggagacaaaaatatttatatataattttcctctaagttcactagtcattttatagatcagttataactttggctactccaatgagttaatttctttctagagacattataaactccttaaagatggaaaataattgttacttttttgaataatgcctactatctaaaacaatgcacataaaagctgctcaataaacttttgttgaattgagagaaaatataaaaaattgaaagcagtctgtttgtaataagtgtttgctaagtcttacagatcttctcttttttttggaattattgcaacaaatatttgacctttgatttgtaggattaaaatgtgatttctcatattttaataggagcaagcattagtcctgcaattctttttgtcaatagaataaaaatggaatgtatgcttgctgcttctacatgccggttgatacccatgctgaacacttttcttacaacgcagaggtttccttgttttctgtcttgcgttctacctttgctcaccacagagacattaatgatgccatgtgtctttttgcaccatcagtgcagcagctttcattatgctccttgtctcggtcccactgtagtctaattaaataaatggaaacgggtagtcactgaaaataaacagcaactgcaaaagttttgcctcttaagaaaccttctgcattgtattccgccctgcctcattgattctaagatctctaccgcttccttgtgttcagaaaccagactcttcagtttgtcttgcttcagtcagacaaatgctttataaaaatgacctatatttttcagactgtggggagagaagaaaaagactttgagaaagtgactaaggagggagtaagagtgatacaatctttgattcaatttagttggactgtgttctttatgccttcatctttttctttataaaaaagatagcgtttttgatgctctgctccaggcagcctcccagggtgagtgcagatgtgctgagccatttggctgccttgaggaccggctcagagagcctctcttctcactaatgaagtcatctcctctcggcagcccggcctctcccatcactccatgttggaacttggctttggcttgcatagttctgtcgtgatgtagatggtctttcagttaagttctagagaaatctgctcaaccatgaacaggacatttacagcacaggagaaaaaaaaatttattaaaacaaatattttactgtaacattttgatttgggggttggagagcaaaaactcaatatctgatgtctgggaaaaatctaatgttttatggctttctaaggaaatttgtctgtgtttaatttatcagagcaatttatatacttcgggttaaagcacaatgagattgccaccatcactttgccttttgcaagatttcttttttaagaataaaaagaaggcaataaagaccttatatttctgcctttcctagaaagccaaagagaattcaaagtgctggatgaaatgtctgtccctaatttgcagtgttttatttaaaaaaaaaattatgacacaatcttagaggataggcttcctttttccagggtctttgaaagttaaaagtacatttttaatctgtagcattactgtatcatccagtgaggataatttgcttagttgtgcctaggaccagtcagatcaaggagttgaaactaagctctttctgaatttgaatgggactggaatcttgtcatccctagagcagcaatagatgatgccatgtctaagaacacttcacctgatcaataaaaaaggagaagtctgaaatgtaatcctaaagaacctcagaaggaggtttagatgaagataataaaattccctggagacacatctgccatctacacctttcctctccaagtcattggcttgctgcccctgagctcagccaaattcccaaagacaagatcaaagcaaggaagcaaggcacatagcttctggcttatggtttcttttagacacaagcattgtgaatgaagatcttgctttatttatacctgggatcttggagttttcacaaagaatatccccagtacaaggatgtgatttaaagggggactcacagaataatattttaattactgtttgattcatacttgagtgtaatggacaaataaatacaattttagttataaaacctgaaaaatatatattttcccattcaaaaacttctgatagttttgtcaggcattggagaatcagaaataaatgctctctcattttctttctcttgatgaaggaaagtcattaaaaacagttacatagaaataataatacaactgtagactctattctaaatatagctggtatgttttcctttttcttttttatccattctccattttagacagctagaggggaaagtctgccctagagatagaaagaagatatccatggggtataatttcattttagttatctgatagcctgaagaagtatttaattttctgaataataatgttacaagtcaaagaagagaaaagacaggcagtttaaagcttttcaacattgtgcatattctaattccttaagtcagccctgagaaagtgcctttgtcctgtagaagtatttggtcaagtgttgtgaagtctattggcattaaaagaaactaaaaattttggaggattagagaatcaaatttggcaacataaatgaaaacatctcagaatgtaaaaagtatctaacccatcactttcaatcatgttccattatatacagatggcattatttatagtgaatgttaactattaacatttccctaaaaatgggcattaatctgctattagttgcttgtttctgatctagttctcctttgttgaaaggttttacttaactgtatcataaagggacaaaagggtaaaagataataagcttttcagactggcagatctgtcacttacaaaatggccttgggcaggttacttgaactctttgaaactcaactagatttactcaaatttaagaatgagaatacaaatccacatcttgaagtgtttcacagaaaggtctatcttaatgtctggagtatatatttcaatgaacattcattttattttatttctctccattcctgaatcaagcaatcttgaatctaaagttgctatgattagcactgaaaagaccactggactattaattgtgtgactttgggacagtaactttctgcaccttagtttgtttacatgttatacatgaaggttgaagtctgattctgctctgtgactatcattctaaacatctgatgaaatcaaatttcagtgtttggaatggtagtacaataaatttactaagaataaataattcactgcaaaaacacattgatttccaaatgatgtaactgacagttatattactgcagagggctgataaataacaaaagaaatgaaagatgcacatggtgagaactgaaattatcctgacaagtcttctacctgtttatcacttaaaatcaatgaccatgctgaatgcctacaaattacaaaatataaaagaaatcttataaatgcgcatgtacaggagtctaagttactaaaagttttaaagcataagtttaaaccaaactaatcaaagaagttgagaggaaaaattggctttcatctttaatcactactgttttgaggtcctatgtttaatataattttctaagtagaggcttcagagagaagagttgtgaggatactttcatatttgtgtagaaggaaaagtttgccatccattctagtatccctagtgttatactgatgtgcaccttggatttattttgttcctattgtataaactcatacttgacttcaaagaaaaggaaaatccaaagtccctcttttctaaggggacagaaatcctttgtgtcaactgtttgacccttttctctgtaaggtcctattggaaatcttttgtaacacaatgcaggggactcttccatgtgttgatgctgtttacacagtggggtgggcctgactgaagaaaaaaaatcgcatatacgcatgaaagattatggtcttatttccggaaagcatgaaaggtgattgatacttccaagaagtccctgttactcaggaaaattatcaaatattctactcagagatacttggaaagactgaaggaaaggaagaacgaagaaagcagaatctagacttatgtggggagagatttgtggcagaggaaaagtattctctttgaatccgacaagggatttgcctgggggaatttcctgtccagccttttattaccagggtcttttgaagccgggctccccattgggcagttccctgggagtgcagtggggaattcttacactttccctctaggtccccgaaggatctcgttttctcagtgtctctttcaggttggcaggagccttgagcctgacacttccctttgatgggacaggcaagctctgtgggcgcgtaaacacgctgtaaccaagttctttgctgattttacagttttgtgtgctcccgagaagaagtgatcgtactcaattgtctattgctggcctgccccctaagagcctgggggctcctttcccctaacccagaactagctgcacggggggcggggaagtgggggtggggaaggagtgggagggcagtggtttccgcgagcagagcgatgttactgagtgagtccctgaatggggagcgctgctgtccccaagccgattggtacttcttgtcaggaagaaacgccaagaggtgggagtgcctggggagggaggcaggcggtccctaccgcaggcgcggggagctgcctttccgcccctccgcctgctttccaagcctggactcttaggagtggctgaagctgcggagcgcttttggagcctgtgaatgaaccctcctcctctccctcctccttcttctcgctgagtctcctcctcggctctgacggtacagtgatataatgatgatgggtgtcacaacccgcatttgaacttgcaggcgagctgccccgagcctttctggggaagaactccaggcgtgcggacgcaacagccgagaacattaggtgttgtggacaggagctgggaccaagatcttcggccagccccgcatcctcccgcatcttccagcaccgtcccgcaccctccgcatccttccccgggccaccacgcttcctatgtgacccgcctgggcaacgccgaacccagtcgcgcagcgctgcagtgaattttccccccaaactgcaataagccgccttccaaggtaatcacgtttcttttgttccccccttaaaaaacaaaaacaaaaaacttatagaaaaaaacccgcgagcttagaaaaaagaagcaattggtagaaggctttaattaaggcaaagagctgtaaggcgaagttaagaaaatgtaggcacttaaaaaatgcaggtaactttcataaaggcttttggggagaggcatacagagggaccttggtgttgaaaaagattcagacaaaagaaacccagggtggggtgggggtaaaatgactaacggaattgggggaagggagggaataaattgtaaagaaatcatagaaaagtggtgggttcttgagctggagagaagagagggacctttggcactttgatttttttgttgttgttgttcttaacacgctcgaggcaaaagtttgaatggggactaccaagacttgccacagacaagtccccgaagccgccttggtgcaggccacctggtttcccagcccctggtgtgtggtcagtgcctggtgttcctggaaagccactcccgggcagctcctgacagtgcgacccggcgcccaagcagcctgggaccttgcgcggacctgaccccttcagaccgcaggcagtctgggaggaggtccggccgggggaggtgcaggatccccgccgtgtctctttgacgacttggggactgtcacggttctctcccggcgcccctgggttcttttgtcctgcacgcggtgcgaaggggccagcagggaaggagcagaggatggggggtggggttgttggagccccgcggaggtctgggaggcccctgggcgggaaaagcctgttctgaatcggcagggatgtgcaacaatttttctcaccctgaagagtgaaatagggtctgtcgctcccatctcaacaagcaaaccggcacccagagcgcactgcagacaaaggtggctcggggacccgaatcaggggcctctgggtcagtcctctcgcccagactacaggagtcctccgtttccttacatattccccaccctctcctagttctccgctctagttgagcaactttactggcaggtctagcggcagcggcgcgcgcgtgtgccgggagccccgggggacgtcctcggctggagcgccccaccgtcctgcagaggcgtgggcgctgtagggcgacatccctggtgcgtgcagacctagggcatccgggttgttctggcccgcggtctgtgtcactgggcgtggagcggtctgggtgttaggcagaggagagcggggtagaaaaatagtgtcatagcctaaactatttgctctccaatccaactgcgtctcggcaagtcctgcatgtccctgggagatgctgcgggaagggggagaaatctacacggcgcctggagagttgtcctgccgcgcgcacacccgcggcagagtctctctgggtcgcgttcctcatctttgtgtctccctctgtctccatcttctctgcctcccttcccctctcccagcctctgttctctctctctagcttctgcgtcccctcccccacagctgacaaatgaatggctagtgtgaaatccctgcctttcccgtgctccaaggcagcagggagggaggagcgagggaggcggtgcgctccttcggatctgcccccagttcagctcacaagacttgcagaacctagatgtctaggaattgggagttttgcggcgggtgtgggcgccccctgatggagaagtcccgcacaggcggagaaaaacaagccccccagaccaagcgtgcatctttcacaaccttgtgttcaaggatggaaggccctagttttcccttaagtcattcattttgcactccacaatctgcggcgtacatctaggagtttggaggaccctgaaaaaaggtcttggtctgtgcaaagtgcagagatgccttctcgcgagtcggctggaacgcacgcggcgccctgggtccagttcgccgcttagtggacgaacgcacatggccggggtggagccaggtttcggaggtctagacgcgccaccctgggcgtctttaagaaagataatacacataccgtgctctcaaaacccatgaccacttgaacccaacggtagggccccgccccaggatattgcaaaagaagggctcctaatccaaaacttaaacttcctcaacttcagggcgggcgtcggacgggaaagtggagagaaggcgggcagtgggaggaaaaaagaaagggaaggaagggaagtggaaggaaagaggaccgtggaggggaggaaaaggagaaaggaacggagatggggcagatggcattcaaacagccaggaacggaccggaagggttcgtttcggggtttgggtctgaatttcgagactcgttttaggatactcttttccctttcccagcggcaacaaatgtgactgcagaggcgtgccgggatggaagggtgggaaagaactagacaagcggaggtggtccagccccgcccaaaggggctgggtctggggcccgcccccactcgctcacctcgcgccaagggaggacccgcaacgggcgctccccgcagcggctgggttagccagccgccacgtgggttggcgcttcggctcccagccgagacgggtgtgacttcctgggctcagagactgcagtacagccgcacaggcggccggcgcagccgaggcccccacccaccgaggccaatgggggcggggcggggaaggcagggcccagcttaaccgagagagccgagtggcctcgcccccgggattcggggccggctgcttctggagctgacccgagttccatccagacagcgctgaacactcttattaaaaggctatttaagttttattttattttattttatttttgcttgcttcttgggagtggtaggaggggcatcgtgcttttgttttgaggcaggggagaggttaaaatttactccaagcaaactttttgtcagaaaaatgagactttataccgtattccatttgttgactttttaaatacattcaggtcactctaaagcccattcttagtcaattaacagattaatttcgttccagactgtcataaagagttcgcctggaatggcaaatactgccattcgacaagactaatagaatttcatgggggcaaacatggaagggctgcgagtgtaactgaggttcctgtgcctcaatgaggaaccttagcggggacctggcggggactggaagctcagcacctatttagggagtgactgagctggaaacctggagaagcttggtgcagacgagacggtgcttcttagagctgcattttaagtcctcccattttgctgcatattggaagaactggattttaaagatcttttccatcacctcagattctgtagctaacagccacgtctttttctttttgtctgctgaaagctgtgacctaattgttttaagcacttcttgacaatttcgccaaacccatcctgaaaatattcacataaagtcctaaaataggatgttgtgagtgtaatataaaaataggaaggtaccaatggaagcaacaattagtgttctgagatagaagcggttcccagtttgtaacttggaaatgttaagagcagtacatcagggagaaggtctccaagagtctgacttcttgttctgagctctgagtaaagaaagaaatatgttagaattgtattgtctgcccgcagtaatattgtaaagggttccaatggattccaatgtgattgagcaattacttcctccagcaccaagtccacagtccttaatcttcttgtgagaagattaggtaggaagcgggatgagattcaagacaatcatttaggatttatgtcagaattcaaagttttgattcttttggtagataaaaacagagttggttttaaattgtatttcctgctttcaaaaaaacgaggtttgaaaggaatccccctagatttacataggtttacagatgtaagtttcttctttttccctgtgtttgcaaactggagggagatgcctttgatattccagaatacctgtatctatacacttgtaaattctgctaggaaaggacctaaacagctaaaccaaaggtgaccatgattaatgttaaagatactacccattgttctctcttttgttgtattattaggcttaaatactttggagttaatgattggtcacttaattgagtaacagagcctttgagagcgcaaagatcaactaactctgtctcccaaagtctggcaactaagccctcctttcctggtgagatttaaacatttttgttgacgtcattcatggacaaacatcggtaaacactgtatttaaaatgggatattgccctgtgatggagcagaacttctcaagacacatggttcttttgaaagaaagaattaatgactgtagtaaggtattttttcaccacccacgtagagaaaccagttaggactgacaaacactcattgttgggagttacttgctctggtctgagaaaatatgctgattgttacataggtctgtattttaccagaaaacacaaagcatgtactctccctgatttggaatcagaaaagggggattagatatggatgtcttggccaagctccatttcaattagtgaatttttgccagtttcctcttgtagcctagacttggtaaattacatatatataaagtctgtgtgtgtgtgtggggtgcgtgtgtgtgtgtatgtatacagggtttttaaacactgctaagttcttaccattgaatgtgttagaggtggttgtatttcagaggtcagtacaaagaatctttgtttaatgtgtcagttctgtttcctgaaacacacctctgggtagatttaccaactataaaaggatacaaatgtatatactttccacatctgtatacatcctacctcattcttctaaggattttaagaggtgtttatgtctataaaatgagattacatattttacaataaacatatttgataaattataatctttttattattaaattattgatttgatattacttgaggtatagtggaatgagcactagacttggaatcagaaagtttgagttggactcactagctgagaaaaccaagcaaagatattacttttggacctttagtgtcataatctattaaatgaatatgcagttataaagatcaaaagagtaagtactttgaaaaactatacaaaaaagggatgataatatattatgtcttgggattcatattgatctaattctataattttaataataactgcattacccaagccatgtagtttctactgaatctataaaataaatcagagaggggcatattgttttaaaaattgtttagtttcattaatcagaagacagattacagaaattgactccaatgaagttggacattcagtggaaaggaagaattattcaataaatggtttcaggacaattgatgggtccatgcaaaataagaatcagtctctacctgatttctcatcctaaaagaaatataagatgaatcaaatatgaaatgtagggaataactttttacaaaatgataaaagaaaatcatgggattaaaaaaaataagttaggaatagagaaacctgttctaagcaaaacataaaacccagtgccattctaggaaatactgataggtctgactaagtaaaaattacacaaaagcaaataatatatttggaaaacatctacgacatttgagagacaaaaagctaataactcttgatattccatggacttttatgaataactttgaaaagtccacatctatcaaaatatgagcaaaaattatgtacaggtagtggcagaaagagacatagagttttaaaattatagaaaaaatcgctcagcctcatctgtaattaaataaatagtaattaaaacaccaatgatatgctacaccattttttcaccaatcagaggagtaacaaaaaaaaataatttttttctttttttttttttttgagatggagtctgttactcaggttggagtgcagtggcacgatctcagctcactgcaacctccgccttccaggttcaagcaattctcctgtgtcagcctccctagtagctgggattatgggcacccaccaccatgcttggctaattttcgtgtttttagtagagtggggtttcaccatgttggccatggcagttgatcttgaactcctgacctcaagtgattcacccacctcagcctcccaaagtgctgggattacaggcatgagccactgtgcctggcaaaaatgaaattaaaaagtttgatgcaagtttgtgttggccaggttgtggagaaactgggtctctcatatactgttgtatgaaagtaaataggttcctctacttcaaaaaataatttggcaatcacttttttttgattctttatcaaaagtttttaaaagatgtatatactctttgattcagcaattccacttctcgacattattatatggatggatattggtaccaatatcacccaagacaaatggacaaggatgttctttgcagcattgcttctaagagcaaatatctggaaacagtgtaacaggctcatcatagggaaccatttaaataaaagttgctgtatccacctaatggaaaactatgcagctgtcaaaaataacatggaaaaattgtatttgctgatttggaacattctccaaaatatattgtattctaagtgaaaaaattgatagataaaactgagtatatattatacatctaattatgtaaaatgggtgtatattcattcttttaacaaatatttactgagtgttctaggcattgtggatacaggagtgaacaaaacatcaaagactgctctgttggaacttttactatggtaggtagagaaaggcaattcccaatcacatatgcaaaatggtgatatgtgctaggatgaaaatagagcatgggaaagggaatagagtacagtatgtcttaggtagagtaatgagaaaggagttcaccaggcagagaacagaggagtgctaaggggcgacaatgtgaaaaagcttagccaagtccaggttcaggaattcacatgatgctattacttgtatgaagtaaattcatgaaatttcgcacctaaatcacgtgatttctctctgctgtacaatgattctttctgtgagaaagaaccagtgagcaatatgatatgtgatgctcattacatccactttgtagctgaagtatcctagaaagttggttgtctagggtacctaattagcagaatggtggacaaaaccaccgtgtctctgtccttaagtcaccccttgtcagctgagcttccccaaaatcaagggagaatactaaatatctatttaatagaatcttggctttctctcggaggctgcccatccctggtgtgtcccttatcctccctgcagacatttctcatggataggagttccattgaccttgtcttttatgtctcccaggcaattaaacagtctcagtaccctgtacctggattgttcaatgactttcttcccttctcattgacttcactggagtagaaggctaaatataggcattcactctcatatctctcaggtctttccatgcagacagagttgttatcactagtagacggtgcttataagagagacatggaaaagtggaagaatggaaatagggatttggagtggtgctaaaaacaaagaaagaggcttctgaaagctttccatttaatatgatcaaacatagaagacaaaagatgtaacttaatgaccaaggatagggacatagccttgagaaaattacagaagtggaatgaacgtcttggactccaaagaagagggaatggaaatgcagttctgaggcagctaaagtcaataaagccctctgatatatttactgtagaaataaatgatcatcttttaattcaaggtttgcaaacttaggtgactacaggggcgaggcatggagtggaaatgggtaagagactaagtgggggcagtaatggccttgagcacacagacttaaggggagagactgctgcttggttaatgctcatgatcagccagctgaaatatagacttagtgttgctagaccttctgattttttgaaagaagttagagattttatatttagtgtaaacagtctaatttttaaattgagtaacttattcaaacatatttatgcaacttattcaaatgtatttagagcatgtctgatctcctccttgtattcttacctagtcttaggggtaatcttaaggaaagtgatgcgtatacttgttgtacctatgtagatggaggaccattctcctctccccaacaaaagacacttttataaggattgagtgtggcacaaagagttcgatttttagtatttaaattgagtaggaaactcaaatacagaagatcctttcctgggtcacacctttggtttttttaaatgagatttgactctctagatattgacaaacatcatattattgggtcatggtaaatcttcaagtggactgattcaaaagtgttcaaaagtatttcaggtgttaaggaattgttggcacggagtttcaaaggtgtttctgcataagaaatagaggcgttgatcatgtatttgatctacaaacattcctcaaggatataccctgaacctggcaatgaagaaatattgtgggaattattaagttgaataaagtactagctctgccttccagaagcctactgttctacagaggagattagacatgtttacagataatttgaagtacatagcaataaattataggatgatttattccaagcataaagtgtatattgctactatagtggtaacctaggttataattttcaaatgtaagagccccaaatactattctttttactcttagtgatatgaaactatgttagaacatctgcagaaagtctgaattagtaattttaataataaatattgagtactgatatattgtatatcactgagatttattttatatacattattttatcaattcctatgatcacttcggtaagtactaattttcacaactaagtagtgacagaaaatgaggtttagagagatatagtattttacccaaagtcacagaatataagtagagaatgcagaacttgcattctgggctatttgacagtggagcccagacttttaaaattaggcttataaagatttcctggaaaaaaagaaaaataaaaaatagagaacaaattttcctgaagaaaagtaggaaattattatttataagtataattaaagagagatctttaatttcttttttttttttttttttgagacggagtctcgctctgtcgcccaggcgcaatctcagctcactgcaacctccacctcccgggttcatgccataaagaaagtttctatttgattggtccgacctgattgtctactagaacataggctttccagtagggttaacaagtcataacagttctagtgatataagataaatacaaactaataataaggttaatttagaattatcaacatatgtttttcattgtgaattatcagttggtctatagatggaaaatataagatatataatgtattagcttaaaaaatgctcttcagagagtgtctagaattatagaatttaaaaattttgttttgaaaaggtctaattcttatttcaaaatatataaagaaatcaaatgcaaaaaaattaagagaaaaggtcttaattaattaaatgctgtacaactccaagccctatttatgttcaagatcagttttgtaatttatgactaatttcagcattagcttgttttcaatctaggtttgctaaataatatagaatttcttttccaatgaagtttttcagggtcccagctgaaaaatatataccagttaggatgctttcaactgtaaggaacaaaaagtcacgattttattgggtttaaacaataatgacatttataatctcatataaaatgaagttcaaaggcatggtccactctaggtctaatccttaaggacttacgccttgcctttgctgattctttctcagcttcatttccagaggtatctcacttactcatggatgcaaaatccctacaacagttccagcagaaagattccagcatgataatgtccagggaagaaaactgaccacctcttcctttgttctcttctcaggatgaatctatctttcccagggacccttcactggaggaagagatcccctcacatctcactggccaaaactatattatatactgttccaaatccaatcattggaaaagggaatggtacctctataattgacttaggatatcaggatcatcccttgggctggggtttgacccaggattctccaaagtatgtgactgagggtaggcactagaatggaaccagagttgtgttagaaaggagaaacgcatggctattatagaatagttctaaatgctaccgaggagggcacaactgtaaaaaccaaataatcttttgccattcttttgaagttggcactttgatttctagatggttccccaacacaggttcttctcctcctcatcattatagctgccttgaaatttgagctggaagggaacattctgagacccagattgttaaatgtcttttccaaagtcatgcaataaattaaatggcaaagccagggcagtttcttgactcagtacagggtattttctttcattctttactcttgagactttagaactgttggtactgctttaaaattcatggcaagaactggtcacttttgtaattaacacctccttataatacatttgttttgtttgcttagccagctagaaactacatggagtctgtgctttaaaaagcctgccgaagtccttattctctgttttggtattatgtgcatgaaccaccaattggttccttctcaccttacacttgatgaagatgcctttctttcaacatctttctctattgctccccatcttctcttgctctatttatgatcagctgtctgtttctaaatagactttgtggtcacccatttctttttgtgccagctcctatccactagttacttgaactgtggtctctattgttcttcatacagcctactcacttgtggttgtcacacacatccacattgttatatgttcccaaactgtattctggaatgattttggtaatggctgcattggatgagattcaaactaataattaaagcattgagatagcttctgctattacaagtttactcctgtttttatagtccaagaggagctacttcttctactcttattacttaatgcttaatactacccttattacatacaatgcacaaaaagcatgtgatttatgacccactttaaacctgaatgcttgtgatttactttgtgtttttcttcatttctagg

SEQ ID NO: 22 - DNA, 6090 bp, Homo Sapiens
cagagatggaatgctcaaattaggacaattcagggaggtgtgggagaggtgcagggggaccataagggatggagcaggaacccaaggtagtaatagcagagctggcaccaaccctaggctcaaaaagacaaaggagagagagtggttaccaaaacccagaaagagaaaacccggtaaaagacgggacctggtgaggagcagcaacctgtgtttggctgtggactgtggcaatcttgcagggaggagagcagaggaatgactatcttggcttcactctccttccttctccttcatctcatgtcaggtgccccattggctaaacctaccagcaaccagaggacaaggaatgcattaaaataatcttacggctcagagagtagattagatgtagagtgacaaatggattatatttagcacaatcgcaggtctatttgttgatccgtctccctcatcagactgagttacctgaggacagagaatgtttctcttatatctgtatccctaacatttggtggacactagatactcaagaaatgcttatggacgggatcagagaagatggtaaattgggcattagatggaggtttgtgctttctgagcttgccgcatgctttctggcgaatccaaggcaaaatgagaaacagaatgagctctgtacttttgtctggtaaaagaaaatatgatttggtgagaagaaatgaatacttttagcactcagtgctgggaggaactggaatcagtcatgtgactgcctctatcagaggctctcaactgcgtaacggacagaatctttaatggtgaaaccacaatgcagaaacattcttttttttttttttttttttttttttgagacggagtcttgctctgtcacccaggctggagtgcagtggcaccatctcggctcactgcaagctccgcctcccgggttcaccccattctcctgcctcagcctcccaagtagctgggactacaggcacctgccaccacacctggctaattttttgtatttttagtagaaatggggtttcaccgtgttagctaggatgctcttgatctcctgacctcgtgatctgcccgcctcggcctcccaaagtgggaaacattcttaaaaatattagcccttgataaaaccaaagccatgttacaaaaaagcaaccaaaaggtggaaatgagataatatggtccactttgagctgagaacatcttgccagaaaatgattgtctcagacttcaaatctgacctcctacataaaccttcagtgcaatcctccctgtattatctcttctctcatcagccaaaagatggaaaggataaactgaggaacttacgctggaggagcatggattcattagatggcagaaacctgggtttctgaatgactactgtggagctgatctctgcttatgccctgcaaacctttgtgctgagagcaagtaacacatttttaatgtgttaaacctctgggatttgttgggtcttatagcaatggttattttaccctaatacgactgtaaaataatgttctaaaatctacagtcgggtttgtttaaaatattatcgccatcattattataatccatagtccatatcataattatttttatagaagtccttctcaactggcatctcataatttgtggcttcttatattgttgccttctatgtgtgagatgcctctctgagtcctttttgctagggacatgatagaaaataaaatatccaacattctggtgtattttataatgtacaaagtcctgtttcatgcattatctctttagattctcccaacaaacccaaggaatatgtaagggtctataatcatcttcatttcacaggtgatgaaactgagacgtttacatgtaaagtggaaataaccacttatttatttatttatttattaaataaaaaccccgctaatttatttaaagattaattgagagaattatttcatctgtctggaacctggtatgtgttaagagaaaagttttcttaatttttctttttaagaagataatctattgctacataacaaaccactctgaaataatgacttaaaacattaaaagtcattgattttgctcacagaacttgaactggaagatataaacaactgggagtgagggtggggctggacagctggcttctctgggcatctctcgttctttctgtggttttgtcacatgtctctacatggcagccctagggtaatcatgacagctgaaggctttagagtgggtggagggggagagggagggagggaaagagagagagagagagagagagagaaagagaagcaagcaggcagaagctctaatgccttatgacctaaccttggaaataaattacactgtgccactgccactaccttttcttagaagcaagcagatagggttggtgaatatttattgagaggggaattagactccacctcttgattgggggagtgtcaaagaatttgtgaatatgtttttaaatgaccacatttcccctttctaaaatgcttgtctaaattggtgtacacaaaaagctcgggggttagtgactcatccaaggttattaagctgttaaatggttccaccaatactagatctaattttgtgactccaaatttcatgctctttttcactactccagataatctccggtgaacatcattgtccattagggtagttaagacattctagctgccaaatagattcagtccttttaattgcctcggacaatatattttttattttgcagaaaataaatattacccatatggcagtcatccataaacaccttccaagtttatcccaaacatctgtgttttaaattttttctcccaacagatgtattcatttgcattttcccagatgaatcactctttttttgttgttgttgttatttttgactgtatttctcacctctcaagacccttttgtattatcaagcccactgcttaagctaataccatctcccaatttggggacttccccttgattcctgtgtgcccttcctgtgggtcattaatgcaatgttatttaagactaggatttggctgggcgcagtggctcacgcctgtaatcccagcactgtgggaggccgagccgggaggatcacctgaggtcaggagttcaagaccagcctgaccaacatggtgaaaccacgtctctactaaaaatacaaaattagccgggcatagtcacatgcctgtaatcccagctactgggtagcctgaggcaggagaatcgcttgaacccgggaggcggaggcggagtttgcagtgagccaagatttcacaactgcactccagtctgggccacaagagcgaaaacccgtctcaaaaaaaaaaaaaagactaggatttgacataaggcctgaggggtattcttttgttttgttttgccttgttttcaagaggccaaaatcttcacagttgaaaatttctgttgaaccacagagatttgaaccaactcagtttagaaagcctggggatttgaacaacggtatggatcggaaatctcttcatctgtcagttttcatcattctaggcagtaaaatagatttccctttaggagcttttcaccgtttggggttctccagcagtgggatgtggggaatcaacccttcttcgtctccacccaaacattaggtgggagcaaggggtgggaagtagagaaagtggatagaggtctccagtggatatgggatctttgtgtagaccagcacagtcctcagaaatctcatgcaagcaacataggtactgttatattttctagtggccaccttttaaaaagtaaacaggtgaggccgggcgcggtcgtcacgcctgtaatcccagcactttgggaggcccaggcgggcggatcacgaggtcaagagatggagaccatcctggtcgacacggtgaaaccccgtctctactaaaaatacaaaaattagctgggcatggtgacgcgcgactgtagtcctagctactggggaggccgaggcaggagaatcacttgaaccctggaggtggaggttgccacgctccactacactccagcctggcgacagagtgagactccgtctcaaaaaaaagaaagtaaacaggtgaaattaattttaataatatattttgtttaacccaacgtatccaaaatactatcatttgaaagtgtaatgaatataaaaatattcatgagatatttttcattctcatatccatactgtcttggactctaatgtgtattttacacttacagcacaattaatttgggactagctacatttcagctcaacaatagccaatagcatatgggatagcgcaaataaactctgcgtctctgttgcttctttgggtctcggagacctcaaccctttcttcagattgcaaaccttcttgccttcaagcctcggctccaacaccagtccggcagaggaacccagtctaatgaggtacgctcccttcctgccattctctattccattaacctgtttcgtggtaaacgtaggactgatcctccaaaattaccttattaattagcttacatatttattatctatctgtcccaccagaatgcaggtttccggaaggcagggatttaaaaaaatctgttttgttctatgtgattttcccataccaagcaccgtgcccggcacaagctgggatcccagtacacatctcgggacggaagaaccgtgtttccctagaacccagtcagagggcagcttagcaatgtgtcacaggtggggcgcccgcgttccgggcggacgcactggctccccggccggcgtgggtgtggggcgagtgggtgtgtgcggggtgtgcgcggtagagcgcgccagcgagcccggagcgcggagctgggaggagcagcgagcgccgcgcagaacccgcagcgccggcctggcagggcagctcggaggtgggtgggccgcgccgccagcccgcttgcagggtccccattggccgcctgccggccgccctccgcccaaaaggcggcaaggagccgagaggctgcttcggagtgtgaggaggacagccggaccgagccaacgccggggactttgttccctccgcggaggggactcggcaactcgcagcggcagggtctggggccggcgcctgggagggatctgcgccccccactcactccctagctgtgttcccgccgcgccccggctagtctccggcgctggcgcctatggtcggcctccgacagcgctccggagggaccgggggagctcccaggcgcccgggtgagtagccaggcgcggctccccggtccccccgacccccggcgccagcttttgctttcccagccagggcgcggtggggtttgtccgggcagtgcctcgagcaactgggaaggccaaggcggagggaaacttggcttcggggagaagtgcgatcgcagccgggaggcttccccagccccgcgggccgggtgagaacaggtggcgccggcccgaccaggcgctttgtgtcggggcgcgaggatctggagcgaactgctgcgcctcggtgggccgctcccttccctcccttgctcccccgggcggccgcacgccgggtcggccgggtaacggagagggagtcgccaggaatgtggctctggggactgcctcgctcggggaaggggagagggtggccacggtgttaggagaggcgcgggagccgagaggtggcgcgggggtgccaccgttgccgcaggctggagagagattgctcccagtgaggcgcgtaccgtctgggcgagggcttcattcttccgcggcgtccctggaggtgggaaagctgggtgggcatgtgtgcagagaaaggggaggcggggaggccagtcacttccggagccggttctgatcccaacagaccgcccagcgtttggggacgccgacctcggggtgccgtggtgcccggccccacgcgcgcgcggggctgaggggtcgggggcgtccctggccgcccagctttaacaaagggtgctcctctccaccccgcgaggaggggcagctccggagacccggtcttcagcgagcggggtcttagcgccggggaggtctacttccttttggggttgccattttactattattattgccttttttttttcttcaaaagg

SEQ ID NO: 23 - DNA, 6274 bp, Homo Sapiens
ggatcacctgagcctgggaagttgaggttgcagtgagccaaggtcacgccactgcactctggattgggcaacagagccagaccctgtctcaaaaaaaagaaaaattccatggctctgcttacattatccatctgatcttacatgttgcctattttttccattaaaactcctagcctattaatcatagtttttttataattaatactccgatgtgataatgtcttagtccaattactgtggttataacagaatgccacaaactgggtgatttataaacaaaagaagctgatttaggctgatttagaggctggggagtccaagagcttggtgctagcatctgatgagtgtcttcttgcttcatcataacatgggagagggcatcacgtgtgaagagagcttactcttataacatagccactcccacaagaattaacccaccgccatgagagccatgtgaattcattcatgaggacagcgggttaagtttccaatatatggacttttcggggacacattcaaaccacagcagttagttgtaacgttcgtgtcatgtctcattctggttctgatgcttgtgcagtctcttcaaactgcgtctttgccttttagtgtgccttgcaatgtggaaatgatatactgggtaagaggagctgtagtaaagaggcttctagtgacgtagtgacaagctgtggggagagggagtgttgcacagtcctgccgcatgtcacagtcttccagtgagcctgtgtccctggactgtgaacttcatgcttgcttctcagcttccccagccccttagatggtacagaactgttggaggggggtggagttgtatatttcccttgctctgggtaggtcaccctctgataaaacaccaggttaggcctctggtgaaataatttctcctgagggcagaccttctattaataatagaatgttccaacctatttcaaaatggttcctcttctccttccactgccagaagcataatgagattttccccctaatattcgtggtaaggacctagcagagctccaggaggtaacactctcaagtgtctcatactaccctgcaccatgactgggctctgctggagttcttaatttgcagaactgcccacactgagcctcccgcaatttctcaattacagggcaaactttcccagccggcactgggtccttggaggtttctgtctgctggtttcttcctctggaggttgtgcttctgtgtttgcctgtctctccaatttggggggcagtggtttgcccaatgacctcaattctctgaaagagctaagaagaggtgttaatttttcggtttgctcagctttctacttgttgctagaatggagcgccaatagtgcctcctatagtgacatgtaaccctcaactctagagatgatgaagcatactaatgacaaaggagaaatgcttcagcagttttctgtcagcacattaccccttgaaaaagctgcttcttccacattctgcaagagatgggtctcaactcagagctcaaggcaaatgacttccttcaaggagaaggaataaacagtctcagaaaccatgaaagcctgcccccaggagtgtccctgaacctcagcaggggccacacttaccttgcagaaataggtgaggcatgctcctggtacaaaatcccaatggtacagaaggacaaattgaaaaacaagtctccctctaaacccctgaccccgagctacctagttctcctccctagaggcaaagctgttaccagattcttgtatctccttaacatatatccttagaagagctgtcaagtgaacacatgtttaagtgaaaacctattttagaagtgcattttcttaaggaactttagggttggaaggaacctgtgtcagtccttaattcacaacctccattagtacttattgttcttgcacaaaaatctttctcaaaaaagccctttccactctgacatagcttattctacttttacttagctccaataacttataaaacatatttttgaaagtctaaaatctgccactatgtttttttttcctaatcaatctttactttgacctctaagccagagaaaacaggtggtcaaatgccttttgcctaagatggaacttagaatatttgaagacctcagatcttcaccctgccaaataacgtgtttctcctcccctttcacagagcatttggttttaggaaattcagagccacattccttatagacaagactaaactcttattcaacatactcagaaacttcttctaagaggataaccactcatcagaggaaaaaagtttctcatgtacagctggcaaagggatggaaccatctgtgttattaaaattgacagacgcttatgagatttattaagggaaatactagagtcttagtacatacttgctaatatagcatacatgaaggctttatctataatttttttggccaagcagaaattttggtattactcaccctaacaaatttccaagacattatgaaatagaattttaggtcctgacatcaccatttgtctcaggttttgaagcgttgctggacaagaggggtaaaacacggctctgccttggattcaaagttggcctctcatactagcaagtataccttggtatcctggtcacttctcccggccacagcatcacattgctataaaaggcagatacaagtattaaccagctcacaggttatcagataagcttagtctgaccaatgcttaacacagcaactgggccactattgtcattcctgtggtggtggcacacacacccagcctctgtccgggccatggtctaggaccaccctccacagaggctgtgagctagagccctaactgtgcagggccctaactatgccaggctacttatctctcttaagaggacttcattagtgcctgctcggccatacagttttttacttaccaagtaacacagttatcagcacactccaggtactagccaaggactacaaaatcaacgtgaatgtcagcttttgtatcaaaagctcaaaggagaaactcaaactttacatagatgtcccatgaagatgttcagcaaacccattcttctctgttccctggaatccatcccagtattgtgctatgtgtgtgtctagtaattctttacaaaaagctctgtttcttgtgatgctatcagatcacattgaagaatatacaagccgtactatgaaggctgttgtctcatatagtcctaacgtagtgagaactgatgttcttacatgctgtctttttgggcactcaaagaaattcctgtacagtcttacaaatcagttgtagcttaaattgatttgtgttgtgacttgtacacacaggtcacattcccttgacagaaaatatagtttaaaaccaaatttgcagcccttgttaagtgaatgcacaggactttattgtattcaggtcttttattgtaagactcactcctgtcttcattttatgttccactgttgtgcttcccatttgcctttctctagttttgttttctgtgtttctacggactgctctcagcccaggtgtgcaggaagcacacacatgcctgcagagccttcatggcctctgcattcagggcatgacttcaacgcacagtggctgtactgatttgttaaaacaaaggaacagattacttctcctaattcacagggaagttccaggttgtgcgggcagtgagcagacctgtgtctgtctgcgcttgccctggtgaaaaaccccaccgttcaggctgcagggtgcgagacccaggcacaaacattttgctggatgaggaggaaagatgtaaggttgctccccttcagagacagcaaagggcaggtctgtagcttcacttacttcaggattgtgatttttgacagagccgagagatcagggttgttgaaccaggcctgaaggtcctagtgaatctcgtgaagagaggaggggtctggctgtaacatggacctagaggacatttttactgcaggagaaggaacagtggggatggggtggacttgccaaaggaatatagctcaagttcctgcagcccaaaaaagctcagtttcttttggccaaagcttccgcgagtttccctggcatttctcctgcgggagctacaggggcagtgggacacttagcctctctaaaagcacctccacggctgtttgtgtcaagcctttattccaagagcttcacttttgcgaagtaatgtgcttcacacattggcttcaaagtacccatggctggttgcaataaacattaaggaggcctgtctctgcacccggagttgggtgccctcatttcagatgatttcgagggtgcttgacaagatctgaaggaccctcggactttagagcaccacctcggacgcctggcacccctgccgcgcgggcacggcgacctcctcagctgccaggccagcctctgatccccgagagggtcccgtagtgctgcaggggaggtggggacccgaataaaggagcagtttccccgtcggtgccattatccgacgctggctctaaggctcggccagtctgtctaaagctggtacaagtttgctttgtaaaacaaaagaagggaaagggggaaggggaccctggcacagatttggctcgacctggacataggctgggcctgcaagtccgcggggaccgggtccagaggggcagtgctgggaacgcccctctcggaaattaactcctcagggcacccgctcccctcccatgcgccgccccactcccgccggagactaggtcccgcgggggccaccgctgtccaccgcctccggcggccgctggccttgggtccccgctgctggttctcctccctcctcctcgcattctcctcctcctctgctcctcccgatccctcctccgccgcctggtccctcctcctcccgccctgcctccccgcgcctcggcccgcgcgagctagacgtccgggcagcccccggcgcagcgcggccgcagcagcctccgccccccgcacggtgtgagcgcccgacgcggccgaggcggccggagtcccgagctagccccggcggccgccgccgcccagaccggacgacaggccacctcgtcggcgtccgcccgagtccccgcctcgccgccaacgccacaaccaccgcgcacggccccctgactccgtccagtattgatcgggagagccggagcgagctcttcggggagcagcgatgcgaccctccgggacggccggggcagcgctcctggcgctgctggctgcgctctgcccggcgagtcgggctctggaggaaaagaaaggtaagggcgtgtctcgccggctcccgcgccgcccccggatcgcgccccggaccccgcagcccgcccaaccgcgcaccggcgcaccggctcggcgcccgcgcccccgcccgtcctttcctgtttccttgagatcagctgcgccgccgaccgggaccgcgggaggaacgggacgtttcgttcttcggccgggagagtctggggcgggcggaggaggagacgcgtgggacaccgggctgcaggccaggcggggaacggccgccgggacctccggcgccccgaaccgctcccaactttcttccctcactttccccgcccagctgcgcaggatcggcgtcagtgggcgaaagccgggtgctggtgggcgcctggggccggggtcccgcacgtgcgccccgcgctgtcttcccagggcgcgacggggtcctggcgcgcacccgaggggcgggcgctgcccacccgccgagactgcactgtttagggaagctgaggaaggaacccaaaaatacagcctcccctcggaccccgcgggacaggcggctttctgagaggacctccccgcctccgccctccgcgcaggtctcaaactgaagccggcgcccgccagcctggccccggcccctctccaggtccccgcgatcctcgttccccagtgtggagtcgcagcctcgacctgggagctgggagaactcgtctaccaccacctgcggctcccggggaggggtggtgctggcggcggttagtttcctcgttggcaaaaggcaggtggggtccgacccgccccttgggcgcagaccccggccgctcgcctcgcccggtgcgccctcgtcttgcctatccaagagtgccccccacctcccggggaccccagctccctcctgggcgcccgcgccgaaagccccaggctctccttcgatggccgcctcgcggagacgtccgggtctgctccacctgcagcccttcggtcgcgcctgggcttcgcggtggagcgggacgcggctgt

SEQ ID NO: 24 - DNA, 3000 bp, Homo Sapiens
acatttaaattgcatatttggcttgtaatatattacatatttaaaagaattactatttttctgaataccattaatactaataatagcatcacagtgactaagagtggacttaaataaaggctggcttgaaactcaggtctgccatttattagcaagcttctaaaaattctgagcccttagttttctcacatgtgaaatggagaaaataaatctgcaaaattaattaaatctgtccattcatatttttctctccagtgtatattaactggcattcctcgttaggccagaatgtgctctcaaccatgctccaaatccgctttgtgccaaccccactgccagaaccctttctaccttgagaaccagaaaaggaaacattatgcctggcaatgcctacaccctccaaaataaatctgcaggaaagaacacccagtaagtgatgagagcagcaacgactgcctttatcattttaaatttacaacaccaccttttctagagcctcttaagcattgtagataattccccactcattaaaaaataaattgtaaccataagtattcagggttgatactgcttttgaattagacagtgctcatatcagttgcataagaccaacctaaagtagaggatgaaatcttttttctgaacctttttcagaacgtaacttagtgaatatattaaaactaaactttctttgaatgggagtaatttctacggattaatctgtaatctcttagaccacacctaaggtaatgtagaggttgttgtatcataggctttgtgattagagaccactggatttgtctttggaaaagtcactcatgattctttgggctttggtttcctcatcttttataccggcttaataatgaccaccgtagagttgtcatggaagttaaatgaactcatgtaccataagtgaccaatacaatgattgacactcagtgatttatcaataaattaaaacatttattatcaatatgacagagaaggtgccgctaaaatagacaataggtttttggaagaggtgattaaatggatgcaaaatttatggattgtttattccgtctacctttgctgtgtcccctggttgtggcatacacacgtgtgggtataaaatcgtaaatcctatgtagtcgcgtagtgcatgcgcagaaggcttagacacgaaatgtcatttcagcaatgtgcctagagaagctctgacgccgccttggaagtaagtcgttgctgcctgacctttgggcgtctgggacggatgcctatacctgcacccagcagcactggaaggggcccaggcccttcgcagcacagcctatccccagaccgcttagtccttcataacatatatctccacggaaaagggtatttcctcccgtcagaaaaagcgccccagtctggtctgggttggtttttatttcacgttgttgcaagtaggcgaagtcccttctgtctcctcccttggggtaagtggaaaggagtccggcagggggcccgcagtggcctgcacaggggaactgggtagcgagagagttccaggcaattccgggggctgccccacagaagcaggtggggatcgacagtggctctccggcccagggaggagagcgcggtcgcgggtccctcccctcagcctggaggctgcagccgctcgagtcggcccgggtgggggcggggtgggggcggcgcggagggcacggagattacggcggcgccacccgggacatccagggccccgaggccctgggcggtccccacgcgagatcgcaaaccatgacaataggcagtcacccgaggtcaaataaaaacggagtgggtcccccgcgcgccgccgccccccgcgtccctggcggcctcccccgaggcccccggcggcctcacgagcccgcagtagccggtggcgacgtcgcccccgccccacctccctgcgcaagtgcgaggctgccggcagcgcggcgcacgctccggccgttcccggcttccgcgcaaaacttccatcctgtccacgtgaagttgtcgctgccttagagagggggaaagagctgcgggaaaagccggggagtgacgactgcggcggctgggcgcgctctctcattttcttttcttctcctttcccccctgtcgcagtccggagttttggctcctctcctttcctcctccccctcggagccggcttctccctccgccccgcttctcccccgcttgtgtacgctatttgttgtggggtggccgaaggggatgtcctgttttcaccagaggcacagcgcgaaggggaaacttcgacactggaaggaacgagaataaatacttaattacggacgcactgaaccgcggctgggacagacacttcgggaacccgaggcggaccgggcgacgaggtgagtgaccccttcttccaacccccgccccagggctcccgggggagcctgagttgagagaacccccaaactttccgggaaagtgcgcgaggctccgccggggacgccgagcgctgggtactgaggacgcgcagctggacggtgcgtgggcgcctgcgtccccggggggcgcttggaggccgggtgccccacgcctgagggcccgggccgctcggaccgcagcggtgctctctgccctagaagacgtccccaagccccaagggtcccttccgagcctgcctgtcccttccggggtcggcgcggagcctgcgcgtaacggagttcatccagcagtccagcgcgcggcttctacctgcaccccgcctccacctggcagaggcgcgagcatcggggtctcccccacatctttcttatgacgtgtattactttctgatgaccccctagatggtccaggcgcgaggatgctgacccagagtccttcggagggtcacaggcgcctgggctttcccggtgccgggtgcgtgtgtactttaaaggctcgcgttctaatctccaggcactgatcgggcttttcaactgcggcgatcccactttaatagtttttatgtggcgtggactgaatgtc

SEQ ID NO: 25 - DNA, 5649 bp, Homo Sapiens
cggtggctcacacctgtaatcccagcactttgggaggctgaggcaggcggatcacaaggtcaggagatcgagaccatcctggctaacacagtgaaaccccgtctctactaaaaatacaaaaaattagccgggtgtggtggcgggcgcctgtagtcccagctactctggaggctgaggaaggagaatggcgtgaacccgggaggtggagcttgcagtgagccaagatcgtgccactgcactccagcctgggcgacagagccagactccatctcaaaaaaaaaaaaagaaaaaagaaaatatcttaagctttgaggaccacatagtctctgttgcaatcactcatttgggccactgtagcacaaaaacaaacatagataacacacacatgagtgagcatggctggggcccaataaaactttatttacacaagcaggtgatgaaccacggtccatagtgtcccaatccttgatttagatggtgaactatcatgagctttcgttgccctctccggtagaaatatgggagaaaccacagagagaaacagagatttcaggaaaacagtaaaattaaacaaataaagtgagacgtcgcccctcctggaggctgcaggctgtgttgaacctgtgtgtgtctgggtgtacagggatgtgagtagatgcgcgtggagatgtgtgtgtgggtggagactgagcgtggctggaggtggctgtggtaggatgccagaaggaaggagtttgcattcagttcctttattagtactctctggagttgttgaggggatgtcactgctgaacactgaccctggtgcaggctaaaccgaagttagcctctgctaccctctgctgggtgaggcactggggagaacagtgggactgaatggggcgggctttctccctcccacacttcccctggaaacacccagcaccagcacattagaacatggggagccaccttccccagcgctgcttcccaaggttcggaaggggaaactctgacctcaagctctgtttgaagagcgatagcaaaggggagaggttggctgtggtttggtggtgcttatctccttcctttgctttgaaaccacaggctggcatactacccgagagaatgaccagtgccaccaagggaagggcacaagctcactggttccaggggagacatctcaggggacaggaacatcccctgacgctgaatgagtgcagcacacagacggagaatacacacaagagaaatcatgaggacatgagagaaggcactggcaataggaagttacaaaaagcaacaaaaagaaagagtagatataaaaacaataatcgaagaaagccaacaacagatgggatgaatcatacgaggtatgcgactcatggatgaagaggtgagtgatgagatcagctggggaactctctcccaggaaagacaaaccagaagaaacacaaatgacatcgaagtggccaggcgcagtggctcacgcctgtaatcccagcactttgggagcccgaggcaggtggatcacttgaggtcaggagtttgagaccagcctggccaacatgatgaaaccctgtctctactaaaaatacaaaaattagccaggtgtggtggcaggcacctgtgatcccagctactcaggaggctgaggcaggagaatcacttgaaccaggaagcagagattgcagtgagctgagatggtgccagtgcactccagcctgggcagtagagtgacagcctgtctaaaaaaaaaaaaaggcagtaaagtgataggaggatagattagaagggccattttccagatagtgcaaggaagaaagaagaagaagaagaggaggaggaggaggaagaggaagaagacggagaagagggcatctcagaagaaacaatggagatacatttctcaaaactgaagaaagatgaccaacctcagaccgaaggccaagaggcaaaccagagagacagcttggcaagccaggaagagcaccaaagctagacaattagagtgaaattaaagaaaacccaaggtgacaaaaatttaaaaagcttccttgtgacctcagtccattggtgaaaatttaaaaaaaaaaaaaaaaaaaaaaggacagcctgggcaacatggtgaaaccccatctctacaaaaaatacaaaaattagctgggtgtggtggcacatgcctgtagtcccagctattcgagaggctaagtaaggcaggaggatcacttggggccaagagttccagaccagctgcggcaacatacatgttgtgggaagtcaggcaccccgaacggagggactggctgaagccatggcagaagaacataaattgtgaagatttcatggacatttatcacttccccaatcaatactcttgtgatttcctatgcctgtctttaatctcttaatcctgtcatcttcgtaaactgaggatgtatgtcgccttaggaccctgtgatgactgcgttaactgcacaaattgtttgtagaggacaattgttgtgtgtttgagcaatgtgaaatctgggcatcttaagaacaggataacagcaattttcagggaacaagggagataaccttaaagtctggctgcctgtgggctgggcaggacagagccatacttctcttattaccgcaaacaggtaagagaaatatcgctgaattctttccccagtaaggaatattaataattaacagccctgagaaaagaatgcattcccagggccgggccactgaaatggcctccctgagagtgcctgcctttattcagaagtagaaagggatgaaacacgccctagtctcctgcagcacccccagacttgataggattaggaaattccagcctggcaaattctagtcagaccggttctctgctcttgaaccctgacagtgcgtgccagtgggacctggaagttcattagtgattctagtttcgccgtgaccttctgccctgtgatcttttgtcgcccttgaagtatgtgatctctgtgacccacaccctgttcgtgcactccctcctctttgaaaattgctaataaaaactcgctggttttacggctcagggggcatcacggaacctgcggacatgtgatgtctcccctggacacccggctttaaaatgtctctcttttgtactctttccctttatttctcaggccagccgacacttagggaaaataggaaaggacccacgtgaaatattgggggctgaatttcccccgataataagtctcttaaaaaagacttttaaatgaaatttctttgttttttaacttttatttctgttttgggggtacatgtgaaggtttgttacataagtaaactcgtgtcttcggtgtttgttgtacagaatatttcatcacccaggtattatgccgagtacccaatagttctcttttctgctcctctccttcctcccatcctgcaccctggagtcaaccacagtgtctgttgtttccttgtttgtgttataagttctcatcatttagctcccacttacaagtgagaacatccagtatttggatttctgttcctgcattagtttgctaaggataatagcctctagctccatccatgtcccacaaaagacatgatctagttctttttaatggctgcattaaatgaagttttaaagatacaacataaacaccaacctcttccccaccacaaaaatcccttgctgaatttgattacacttaaattaacgagttttgtttcatgaaagactccttggacaaacttgacagttgatggaataggagaagctgtctgtcatgtctaaagccaacaagagatcaatatctagaataaatggagatctgcaaatcaacagaaagtaggcagcaaagccaaagaaaatagcctaaggcacagccactaaaaggaacgtgatcatgtcctttgcagggacatgggtggagctggaagccgttagcctcagcaaactcacacaggaacagaaaaccagcgagaccgcatggtctcacttataagtgggagctgaacaatgagaacacatggtcacatggcggcgatcaacacacactggtgcctgttgagcggggtgctggggagggagagtaccaggaagaatagctaagggatactgggcttaatacctgggtgatgggatgatctgtacagcaaaccatcatggcgcacacacctatgtaacaaacctgcacatcctctacatgtaccccagaacttcaaataaaagttggacggccaggcgtggtggctcacgcctgtaatcccagcactcttgggaagccgaggcgtgcagatcacctaaggtcaggagttcgagaccagcccggccaacatggtgaaaccccgtctctactaaaaatacaaaaatcagccagatgtggcacgccacctataattccacctactcgggaggctgaagcagaattgcttgaacccgagagcggaggttgcagtgagccgccgagatcgcgccactgcactccagcctgggccacagcgtgagactacgtcataaaataaaataaaataacacaaaataaaataaaataaaataaaataaaataaaataaaataaaataaaataaaaaaataaaataaaataaaataaaataaaataaagcaatttcctttcctctaagcggcctccacccctctcccctgccctgtgaagcgggtgtgcaagctccgggatcgcagcggtcttagggaatttccccccgcgatgtcccggcgcgccagttcgctgcgcacacttcgctgcggtcctcttcctgctgtctgtttactccctaggccccgctgggacctgggaaagagggaaaggcttccccggccagctgcgcggcgactccggggactccagggcgcccctctgcggccgacgcccggggtgcagcggccgccggggctggggccggcgggagtccgcgggaccctccagaagagcggccggcgccgtgactcagcactggggcggagcggggcgggaccacccttataaggctcggaggccgcgaggcttcgctggagtttcgccgccgcagtcttcgccaccagtgagtacgcgcggcccgcgtccccggggatggggctcagagctcccagcatggggccaacccgcagcatcaggcccgggctcccggcaggctcctcgcccacctcgagacccgggacgggggcctaggggacccaggacgtccccagtgccgttagcggctttcagggggcccggagcgcctcggggagggatgggaccccgggggcggggagggggggcagactgcgctcaccgcgccttggcatcctcccccgggctccagcaaacttttctttgttcgctgcagtgccgccctacaccgtggtctatttcccagttcgaggtaggagcatgtgtctggcagggaagggaggcaggggctggggctgcagcccacagcccctcgcccacccggagagatccgaacccccttatccctccgtcgtgtggcttttaccccgggcctccttcctgttccccgcctctcccgccatgcctgctccccgccccagtgttgtgtgaaatcttcggaggaacctgtttccctgttccctccctgcactcctgacccctccccgggttgctgcgaggcggagtcggcccggtccccacatctcgtacttctccctccccgcagc

SEQ ID NO: 26 - DNA, 12781 bp, Homo Sapiens
cactatgttgctagctggtcttgaactcctggcctcaagtcatccttctgtcttggcctcccaaagtgttgggattgtaagtgtgagccactgtccctggccagttggtgatttatttgtataactgtccaatttattgaatacgtatggcgtgccaagcactgggctgagggcttcataatgccctttcactcaatgcttagcacaacccatgaagaaggtagtgttaatatcatccctgttttacagatgtagaaactgaggcacaggctaaataacttgcccaacaagctcgtgcagtttagtaagcagctcagctgggatgtgaacacaaactttgaatacagagctcttaaccagtaggccagaggttcccaaacacctagtatatttactaccttagtactttcctgccacatctcctaggccaaaacaactccattgattgttatgcaatttactaagtgtagccatttgaaaaaaaaatacatataaaagaaaaatatttttattcagttttcaaaataacccatatatagtcatggaatgtatgtgttggttgggcactgcagactaaagacagtttagggccgggcacggtggctcaggcctgtaatcctagcactttgggaggccaagtagagagaagggcttgagcccaagagttggagaccggcctgggcaacatagcaagacccagtctctacagaaaataaaattatcagggtgtgaggacgcacacctgcagtcttagctgcttgggaggctgaggctggaggatcagcctgggcaacagagtgagaccctgtctcagaaaaaaaaaaaaaaaaagacagacttttattcagatatgcatgcaggagttcacagaaaaaaaaagtgagtccaggaggctgttatttggcatttatacaactttttttttcttgaatctcgaaatctactttatatataccatttaataggggaagaggagggagaaaaagccttccatgggaagaacaaataggtttctgggggaacaaaagggagataagaatgtttgtttttgcaggtgcaagtggtctttgtctttttttctggccactaaaactcccctagagaggagatttacggcagcttcactcccagaaatttctgctgttagtcgcataagggaagctttgaaacggcatctttctgcatctgttggctctcaaatgtcttcagttccaagtaacattcatgccaattctgggggtctgagtgtccccacataatacatgtgttctcttgtcttttaatgaagtttgtgggaggcatctaactgtagcctccaaaatttggcccataggtactactgtccttatcaaagacgaggaaacaagttcagaaaagtattaattgctccgagttatctgcttggctagctaggatcagagctcagttctccatttaacccaaagcccaggctcttaacctcttacaactggcgcatcccctctgaacctccatttcctccctgtaaaagaataacatcggccgggcgcagtggctcacatctataatcccagcactttgggaggcagagatgggcggatcacgaggtcaggagtttgagaccagcctggccaacatggtgaaaccccatctctactaaaaatacaaaacttagctgggtgtgttggtgcctgtaaccccagctactcaggagactgaggcaggagaattgccttaacctgggaggcggaggttgtggtgagccaagatcgtgccattgcactccagcctcggtgacagagcaagactccatccccaaaaaaacaaacaacaacaacaaaaagagaataacgttatattcagttgaaccaaaatgaattaaatattaatatttgtacttcaaaaacggtccagcttggctgggcgcagtggctcccgcctgtaatcccaacattttgggaggccgaggcaggaggatcatttgaggtcaggagtttgagaccagcctggccaacatggtgaaatcctgtctctactaaaaatacaaaaattagctgggcagtagtagcgcgtgccggtaatcccagctattcaggaggctgaggaaggagaattgcttgagcttgggaggtgaaagttgtggtgagctgagactgcactactgcacaccagtctgggagacagagtaagaccctgtctcaaaacaaaacaaccaaaaaaccaaaaaggtccagcttgggcaacatagtgaaacttcgtctctacagaaaatttttaaaatactagcagggcaccgggcacagtggctcatacctgtaatcccagcactttgggaggctgaggcaggcgggtcacttgtggtcaggagtttgggatcaggcaggccaacatggtgaaaccgtgtctctactaaaaaacaaaaattagctgggcatggtggtaggcaccagtaatcctagcactcaggaggctgaggcatgagaattgcctgaacccgcaaagcaggggttgcagtgaaccaagatggcgtcactgtactccagcctgggtgacagaataagactcctcaattaaaaaaaaaaaaaattagctgggcatggtgttgcgggcctgtggtcccaggtactcaggaggctgaggtgagaggattacttaagcctgggaggttgaggctacagtaagccaagatcacgccactatactccagcctctgtgacagagccagaccctgtctcaaaaaaattttaaaaagggcaaattttggcaatttcacatagttcaacctagtataaggtggttgtaataactaaatgagataaaatggtgttaaattggaagtattatagtatttctgttaacaacatagggctccagaaccagcttccttgagtttaaatccaggctccaccacttcctagctatgcagtcatgggcaagttacttgacccaactgtgcctcagcttcatccatgatatggagatacaggataaccagcctcttacgtgcaattctgaaatccaaaaagctctgtaaaccaaaagtttgggggtaaactcatttggtagcaaattttgacctgaggctatttatagtctatattctgtattctttctacttagtatgaataagcatgtaagttttactgcatgtttgatttcagcatgttcccccagactctctgggggtgtttacgtatgccggtgggggaaagagaccaactctcaaatattatctcaaacagttggtttcactgtgcttgcttgggtagcacatataccaaaattggaatgacccctgcacagggatgaaatgcaaattcgtgaagcatactgtatttttcttagcacataccacctttggcaatattctttttttttttttgagagggagtcttgctctgtcgcccaggctggagtgcagaggcgcgatctcggctcactgcaagctccgcctcccgggttcacaccattctcctacctcagcctccccagtagctgggactacaggcgtgtgctaccacgccaggctaattttttgtatttttagtagaggcggggtttcactgtgttagccaggatggtctcgatctcctgacctcgtgatccgcccacctccgccccccccccgaagtgccgagtgctgggactacaggcgtgagccactgcgcccggcccccgccttttttttttagattgattttattacttgcctagcaaaggagaaccttctggcagaacagtctccaagaacaaggcaaacaactaattttacataggtttttaccaatgtacagctgttgattgtgactggtttccggcaatctggatttcacaatctggataaggggacaaacaattgtctgtcttccactatctttcttgaatttgaatagaacctttttattctcatagcctcttagctttctttcttttttttttgagacggagtttcgctcttgtcgcccaggctggagtgcagtggcgcgaccttggctcactgcaaacgctgcctcccaggttcaagttattctcctgcctcagcctcccaagtagctgggattacaggcgcatgccaccacgcccggctaatttttggatttttagtagagacgggggtttcaccatgttgactaggctggtcttcaacgcctgacctcaggtgatccgcccgcctcggcatcccaaagtgctgggattacaggcgtgagccactgcgcccggcctctcatagtctcttagctttctaaaatttgaaaaatcctgtaaagacacacctgggtcaaagggctcagataacggactgtggcccttaagtacttacgtcacaggttattgagaggatcgatttagttaccagatgtaaaatgctgggatcagtgcctggcaaaggaaaactttgtacagctgcaggctttcaccatacacaacagcatcgctaacgaatgctattacaatattcatttagcgtttaccaagtgcctactctatacaaatcttgagaatacaacgtgaaggtgaactgctgactaaagtttggtccctttcgctccgtctccttgcgaaaatgctctaacggcaggaggtcacgcgagcgctggacgcgtttctccccgcgagcccctttccgaggcctttcgggtccccccggttatccccgcccgggcggtgcgcgcccccgctgttcccgcttccgctccagagaggcagggctttccgagcctgctagccccgcggccgcaactaaccccgggtcggagtgttccggcccggccagccccgcggcgtgagggaaggggagctcagcagttccccgcgcggggcccaggcgtcggcggcagggcgggcccctcaccgccagcgtgccagccccgcccctacccaccagtgtgccagccccgcccttccccacgtcgccgcgcgcccgggggcggggcctggcgcgcaccgcccgcgcacggcgaggcgcctgttgattggccactggggcccgggttcctccggcggagcgcgcctccccccagatttcccgccagcaggagccgcgcggtagatgcggtgcttttaggagctccgtccgacagaacggttgggccttgccggctgtcggtatgtcgcgacagagcaccctgtacagcttcttccccaagtctccggcgctgagtgatgccaacaaggcctcggccagggcctcacgcgaaggcggccgtgccgccgctgcccccggggcctctccttccccaggcggggatgcggcctggagcgaggctgggcctgggcccaggcccttggcgcgctccgcgtcaccgcccaaggcgaagaacctcaacggagggctgcggagatcggtagcgcctgctgcccccaccaggtagcggggtgggggtggggtcgaaggcgggggcatagcggcggggcgcttggaacccggcgaggggaggctcgcacagggggttgggggggtgcacggcctggccctgggctcggaggaggcggggccgcagagttggcttgaatgagtgcaggggtcgagtctggagcatttgggggtgtagcttgtaaacagggtcggaggagagaggctgtgcaggaagagggctgcaggggagacgcggagagttcgggccttttggagggaggagacgcgtcccgccaggtgggggtgctgggctaaggaaggggcgacgcgcgcagctccgggtggggagggggcctgggaggtgggagcactgggggtggggcgagaaggggaaggcgcccggcccacttggtgggcggggcggggggcggggtggcgggaaggaggaatgcctgcgggaggccgaacggggagagtccggtggtgtggggtgcgaaaggaggttcctcggccggcgcggagatagtgagttggggctccagtagtcgatcgaggtagacacttagaggtagttaagagccgcggtcgccgagacgccttggggacggtgggccttcggcctaggtgaggggccgccgagggggtgggccacgagctgcgagcgcgggggggtgtgtcaccatggggaccgcggggcctaattgggcggggcggggccgtggggagccgaagtgctgggatccggctgggtccttcggtaggtaggctgcacgtgcaccgagacgaagatagaatattttgacgtatgtggaaattcgtgtcgagtggaaaatattttattttatgaaatagtgtaatttttatggggcaccactgggcttttagaggccttaatcgggcgctggacaaagatgtgtggacgtgagtgactccggggaagcctgtcgggagttgtcctcactttatgggcagttaagtgcttttttttttttttcctttttgagagagagtttcgctcaagtccaggctggagtgcaatggcgcgatctcagctcaccgcaatctccgcgtcccggcttcaagcgattccccagcttcagcctcccgagtagtcgggattacaggaatgcgcccccacaccccgccaattttgtatttttagtagagacggggtttctccatgttggtcaggctagtctcggaattcccgacctcaggtgatccacccgcctcggcctcaaagtgctgggattacaggcgctagccaccgcgcccggtctgtttagggctttttatccgggcagctggcgacattttgaaaagcttgcttttgctgtttgccagatacatatatatgtattttgagacagagtcttgctcttttgtccaggctagagtgcagtggcgcgttcttggctcaccacaacctctgtctctggatcaagagattatcctgcctcagcctcccaagtagctgggactacaggtgcgccccaccacgcctggctaatttttgtatttttagtagagacgggtttcactatgttggccaggctggtatcgaactcctgacctcttgatcggcccgcattggcctaccaaagtgctgggattacaggcatgaaccaccgagcccggccgtttgtcagatactaaacacaaagtttaatggtcgctatttgaacaaacgaagaaataaaggctcagaaaaaataactcattcaagataagagccagttcgtgttttttgtttggttttgttttgaaatggagtctcgctctgtcgcccaggctggagtgctgtggcgctttctcggctcactgcaacctctgcccgccgggttcaagtgattctcctgcctcagcttcccgagtagctgggattacgggtgtgcccaccgcggtccggctgatttttcaccatggagtttcaccatgttggccaggctggtcttgaaactgctgacctcaagtggtccacccacttcagcctcccaaagtgctgggattacaggtgtgagccaccgtgcccggccgctagttagtggttttgagtaatggatttcaaatccatttaaatccagtttaaagtgtcctaaaggaattctgagatttttctaagtgtaattatagtgttacccttgtttaagcgaccctttcccgcagtttaaatatatatagttgtgcattagtagaatatgcttgtggggaacagagccagcatccgcaataacaaactcctggttagaaaagcatgacgtattgtttacttgagcatgaattgattgttgaatccaaaccaaacgggtgtatttattgtaaggatgtactttacattcatattgaatagcgtatgttatttgtttcttgaggttgagtttaagagacttgtaaaaataaaacgtatacatttcacctcccgttatggagaggattccagggtattcaagaaagatgggcatttgatactaggtttctaaagaaactgcagtgtctagatcactctgccgagcacagcattaggcattatggatcctggatacaaccatgaacaggacaaagcaaagaggcaattgtagactccaagtggaaaggggacggagaggatgcgggtcaggctaggctctcagctctgtaaaccgaaaccagaaggacaaataagcttagacagattatagtgagagtgggaagctggttcaggaagaggaaggtctgcaaattgtgggtaggatgaaaggaggaggagggagcattggagaagttaagcagagatccaatcatgaacagtctgatgagctacagagacattcggacttactccatgaatcatttaagccttaaaacatgttgagcgtattttttttttttttgagacggaatttcactcttgttgcccaagctggagtgcagtggtgtggtctcagctcactgcaacctccgcctcctgggttccagcgattctcctgcctcatcctctcaagtacctggtattacaggtgcctgccaccacgcccagctaatttttgtgtttatagtagagacgggtttcaccatgttggtcaggccagtcgtgaactcctgacctcaggtgatccacccacctcagcctcccaaagtgttgggattacaggcgtgaaccaccgcacctggccgtgagccaccgtgtctgtccgagcatcttttaatgtttgtcatttagatttcttcttgtgctgaagtgtttgtcttttgctgtttcttttttttttcctagttctttgtcatttgtgtgtgatataaatgtcttctttcacaatgagttctttcatttagtttatggctttgttgttgttgttgaataatagaggtctcactttgttgcccaggctggtgttgaactcttgctctcaagcgatcctcccacttcagcctcccaacctgttgggattacaagtgtgagccaccacacccagccttatggcatctttcgatgaacaaattattgattataatgtggaatttgtccttttattttctctgtggttagtgtttctataggttttatttaagaaatccacagggaggctgggtgcagtggctcatgcctgtaaacccaacactttgggaggccaaggcaggccaacatggctagaccctgtctctccaaaaaataagaaaattagccaggcatggtggcgtgtgcctgtagtcccagcttcttgggagactgagatgggaggatcgcttgagtccaggaggttgaggctgcagtaagccaagagatcatgccatgcactccagcctgggtggcagagtcagaccctgtctgccaaaaaataaaataaaagttggtgaaaatgttgattatatattttaggaacaactagtaattgacatcaaaattatgggctaaagagaaagcaaaaataatgtgattttaaaccagaattcaaaagatctgtttagcgtatgtttagacaaagccattacttattatatcaaagttttaacatttattttgtgagctgtcagcttttcctcttaacatttttccccaccgtcttaaaaaaccccaagaataccggacatttaagactcacttaaagctttaaaagcacttgcaaaatcctaaaatcataatttaaggtgtttttggagggcaggagcaatggtggcaggcagtgttttgctttgttgcccaggctgaagtacagtggcagatctcggttcactgcaccctcgacctattcggctcaagtgatcctcccacctcagctttctgagtagctgggaccccaagtgcacaccaccccatgcctggctaatttttaaatttttttgtagaaacaaggtctcactgtgtagcccagatggtctcgaattcctgggctcttaagagatcctcccaaagtgctgggatcataggtgtgagccaccacacctggcctattttggcattcttgaaaaccgcaggattaccacggataaaattttaaaattacctttaaagaattcaggtttacacacaaaaaaaatttggtttgttagcagtgagtgaagaaaaattttgagaaatgtttaaaatttttagttttgttacacaatacattttactacctgtttaattatcttttttgactcagaaaccagtttcctgggtccaggatgtttagtggtactctttttcttcaagctttttagcattggaggaactgcatattagtaaaatttttagtcttagcattttatagcttactgctatttcttttctttcattctttctttcttttttttttttttttttttttttttgagatggagtctcgccctgtcacccaggctggagtgcagtggcacgatctcggcttactgcaacctctgccttccaggttcaaatgattctcctgcttcagcctcccgagtagctgggattacagatgcccgccaccatgcccagctaatttttatttttttagtagagatggggtttcaccatgttggccaggccagtctcgaactcctgacctcgtgatcaacccgccttggcctttcaaagtgctgggattacaggcgtgagccaccgtgcccagcctttttctttttctttttctttttttttttttttttgagacggagtcttgctctgttacccaggctggagtgtagtggcatgatctgggctcactgcaacctccacctcccgggttcaagggagtctcctgcttcagcctcccgagtagctgggattacaggcgcctgccaccatgcccagctaatttttgtatttttttagtagagatggggtttcgccatgttggccaggctggtcttgaactcctgacctcaggtgatctgcctgcctcgtcctcccaaaatgctgggattataggagtgagccactgcgcccggcccagcatactgctatttctttctttctttcttcttccttttttttttttttgtttttttttttttttttttttttttgtgagacggagtctgtcgtccaggctggaatgcagtggcgttttcttggctcactgcaacctctgctgcccgggttcaagtgattctcctgcttcaggctcccaagtagctgggattataggcctctgccactgcacttggctaatttttgtatttttggtagagacggggtttcaccatcttggccaggctggtcttgaactcctgacctcgtgatccacctgccttggcctcccaaagtgctgggattacagacctgagccaccgcacccggcccatactgctatttcttaacagcagagaaattatgtgtcagattctgtaagtgtaatggtatataaaggataaaatgatgttgaaaaacaaaattttttgtttaaatgcttatgtttctaatattttatttcagaaaggaatttatttcaaaactgataatggttggatccagcttttcacacaaacttttttttcctagtgaggatgcacatttatcctgtaaacaaatggaagacattatttttttaattgcttgcttagaaatgaaataattcttttctaatgatcttttaaagcatgagacctcatacatcatttaaaacaatttatactgtattttacacatgacaaagttctaaggtaacagcccttttctaagactaaagttacagtcctccctttgtatctgagggggattggttgcaggacccccctgtgaatacccaaatccttggatgtccaagtcccttatgagatgtagtatttgcatataacctatacacatcttcccctgtactttatctctagattacgtacaatacctaatagaatgtaaatgctttgaaattagttgttcagctgtattttaaattttgtattttttttcctttttttttgagacagagtcttgctctgttgcccaggctggagtacagtacagtgatcacagctcactgcacctttaacctcccaggctcaagctgtcctgcctcggcctccccaagtgttgggattacaggtgtgagccatcatacctggtcactgttttttattggttttaaatttttgatttaaaatttttaatctaggttggttgaatctggactggaacccaaggatatgtttgttgagcatactgtatttactttggaatacaactagaatgcttaacttgtatgttaaaaatactttatttggccaggcgcggtggctcacgcctgtaatcccagcactttgagaggccaaggcgggtgaatcatttgaggtcaggagtttaagacgagcctggccaacatggcaaaaccctgactctacaaaaaaaaggtaaaaataagccaggtgtgatggcgtgtgcctgtagtcttggctattcaggaggctgagacacaagaatcgcttgaaccggggaggcacgttacgccctcagttgttgacttgagtttttccgtagtttgtagggggagggtaatagagtattaggtagcttttggaatacataggagtgtaactggaaaaagattccaagcaagtctaatgaattagataatttacctaattagtaaattatgtaatcagtatgctttataataatattgtgagttagatcctgtttctgatatgtacataccatattgtataggtgctactaatttggagagcatatacagtgagtccatgcctttttcctgccatcagcattataccaaaattctgccatggtttttaaactttgattctgagaaagtttctcaccctaataacataactatatttgtgtttgtcttcatagttaaatatgcattatgatatcagcttgcatacattttttaaatgacttgaatatctgactttaaaaattattctagaatttctgtgcttcaatattaatgccagaagacttggaattgtttatttgtaggtaactgcctttaaggaaacttgaccaaatattaactaagttatgtatttccttttggcaacagt

SEQ ID NO: 27 - DNA, 1631 bp, Homo Sapiens
ggatccagaacatggggcggactcaggcagcggcgggaatcaggcggactcgtttggaccgaagcctccgccaggcaccgaagccgtgaagtcgcctgcgcagcaaagggagcctccggggggcgcccgagaccttggtgtcgctcgggggccgctggtagccgcgcccgctgcccctcgcccggtgactcagccggtacctctggcggggccatgggggccagaggacagcgcggggggcggcgagcgcggttgctaagctctccaaggcctcggagggacaggatctgggcgcacctcaccggttgccatggtaacgcagcgccccagcccctcgcgctccgcggtggagggaggcgcagccaatcggaagcggcggagttctcggggacccccccccccccgctccacgccgtgtgtgggcgggggtcaggaggtgcggggcggaggcggagcgtgggccgcggagatccggcgttcgcaggaggcttggtgcgcggcggggctgcacggggccacttccggagtagtactgcgagcagcggcgcgacagtgcggggtcccctttctcccagaagagacgtcacccacacaaacctgaccttcacgtggggcgcgggaccttgcggggtcccagccgcaggcgcccctgttgtttccttcgggcgggtgggttggagaagaagtccacgcgggattcttcaaaacggcgtacagggggattctagggccccatggttacttctttggaccccccggaggcgctgtccagccacttccagtcgccctgatgactcgtcgtgggttcctttaggagacccgaaagttcagggcgggctgtgtgggtaacacctctgcccaggttcccggagggccctacgtggctgcccctggagtatcccagagcgctagggctgcgggaaggggcgggtgtgcttctggaaacatgagcgcctgttagtatcagtgcctggatagggctggggacaaatcagtttatgccgcgcacaccgaatccatgcgcctgagtgagggtgggtgtgttggggagtgcgtccaagtggacagtgccgtacagtaatgtctacggggagttccaggagagctcggctactcctgcgcaggataacctctcccccaccacccgagtcccgtgctcgcgggcaggacttttccgaactggggctgtgtgcctagaaatacgtacatgggagcgctcagctcaaagccccagggtttctgggactcgcgtgtccggggtcggggtcccaggtgggtacaggtgggagggcgaacctgcgggtagggtgggcccctccccgcgggctcagcatctgtgcgcctccagctcaggtgcgcgggaggaaggcagcggcctgccgcgcagagccctgcgcgcccgcgaggtggcgccatagccgcagcagcgcccgccggcccgggccgctccagataagagtgtgcggaaagcgcggcggggctgagacgcgaccaggacgcggggaggacggaccagcaggacagaccgaccgggggcccggcgggcggagggcagcgcagccacgtcccccctggatccgccgtcagccgggcccggggctttcgacatgccccccaggtgggtcctcgag

SEQ ID NO: 28 - DNA, 9254 bp, Homo Sapiens
tgggggaaactgaccccatgattcaattatctccacctgaccccacctttgacatgtgaggattattacaattcaaggtgagatttgagtggggacacaaccaaaccatatgagtggacatgcaatatgagtgagaaacaattctgtgattgtaacccagtaagatttttggatggctaacacagcataacctagagtatatggaggtgtgcatttccagctctttgacttccgggtacctagtaggattgcactttcctgcaccctttaagtaaggcatggccatgtgactaattttagccaataatatgtaaatacaataaaaagtgtcattcctaggagggagcttttaaagccaatgtgagttcaccatgctttctttcccctgccaaactgatgcgatgattgttgaagcatgtatcaagatgaaaccttcttcagactaggtttctaaatgagcacattaagcagagccccgtgaagttgaacatgtagtatgagcaaaatataaaatttatttttaagccactgaaattttaggattgtttgttatggcagcataacctaaaccatcctgactcatataaaaattggctcctagatatgggttagtgtaataacaacaataagcataacaacaataaaactaaacaatcatttagagggcgataactaagaacactgctatcagaagctgaagggatggtgatctgtttggtaaacatatcacctgtgataatgtagaaggcagatcatgaacctgatgaactaaagaaaaggattgtaaaacagagagtgagtagtgtgtgttggtggctgttggatgcattctgaaagttactacaagctattcaaagatgaactcagaaaaatttggcctgtttgcaatcaggaatgaaatggaatagagaaaacctataaatccagggatttacatcgttagaagaggcaattgtttcccagtcccgactggtaaaatataaaatcaagaaatacttttagcaagaaaggacctggaagaaactaagctttgaagtaaggatcaagtcacaaagtatgaacctactattaaaacctcaggataggaggccgaggaggacggatcacctgaggtcgggagttcgagacaagcctgaccaatatggagaaatcctgtcgctcctaaaaatacaaaattagccgggcgtggtggcgcatgcctgtaatcccagctactcaggaggctgaggcaggagaatcgcttgaacccgggaggtagaggttgcagtgagccgagactgtgccattgcactccaaccagggcaacaagagtgaaactccgtctcagaaaaaaaaaaaaaaggatcaattaagatcttacccagtatatactttcaactggacaaaatggctctgggaaaaggaagaaaggtctaactctcccatcaaaacccaataagcccaaagtgctcaaaatcaagtgaagagcaagagagtgagacggcaaaagagagacagaggagtcaacaggcaggagagcaggaaagcaaagagatatggcaaaccaaagaagtatgtctggaaaagaactttgtggctattgtcacatggaacacctcatatcagatagataagaagcctacctacacatattcaagacttaatgtcactctgcatctccccaacttttaaaagcttatttaaaagcatattttccaatgcctgctttagctgtggaaaaggaagactctccgagggcaaatccaggagtcatggaaaacaatgggcagggcagcttggtgctgtgactggatgggtctttaaggttgtttcccttgaataaagaatgagggaattccaccaggggaaggagagtagaccaaacatttggtgaacagaaagggagacagagtctttagtgttattccccaaatattcctggagagccctttgagacacctggtaggattatagtgatctaaagaggcatggccatgtgactgctttggccaatgatgtatgggcagaagtgatgtgtgccataagtggatgctctgacagccatgatgttccgagttccttccccacagtcaggatagctgtgaaaaggggtatcaacacgaggcctccttcagcctgagccctttagtgactacaatgagcagagctaccctgccaacctacaacggtcatgtagcagaaatgaccaactttcactggaataagccactgatatgttagggttgtttgttagggcagcataacactgcctttcctgacagaactgggagtgagagataaggctggagagagaaggagttggattgtgaaaagccccttctccaaggcataggaatcggaactctcctgattgtaaggaaaagccaatgaaggcttccaagcaggggcgttaacatgaacagatttgttatttttttggatgaaatatgctatttctcaacataaggagaagatcagcctactaaaccacatgaggcagagaggaacacacagaaccttaggcaaaagatatatatttatgcaaagtcctaagtcttgaaatttctaaatacaagagctctgaacggagttacagtcagaggatcaggcaagaaaatttcttctatgccacaagcgctatttcctctgcagataactaatactccacaagaaagtttgccagagtagagaaaatacaaaggaatgtaacacagacctgaggtcaatttccagctgcctgtgtgacctcaacaaagatacttaacctctctgggcctatttcctcacatgttaaatctggataataatatatgtctctcaagacagttgtggggagaaaacagcgtatttaaattgcttaggagaatgcctggcagataataagtgtttaatacatgaaactgatttttattactgttattaaaaaatatttagaacaccaactccctgaatacaacagaaaatgattcagggcaacagacagaggagaatgttctctccttgaggaagcaactggatcttgtcatcactgtatacctacctaccccaccccctccccagctcagtgcctggctcacagtaggctttcagttaccctctgcagatcagtgaaagctaggtgagtgcccggagtgaagaaaagttggcaggtttcccactgataccagctgctgttggtttctgaacactcaaagccgcaaataccttagggctgggggcaatgaacccaaggctgaattccaagttcagaagcagcgaagtctgaatttagaacctaggaacttaaactgctgcaggtccaacttcaagccccagttttagacagaggcttgggaaagatctgacttctaacccggttccccctcccctcctcccctcgatgcttctcacaggaaagtacacctggtcctgccaaatcgcactcttatatcctggcatcctatccaggctctgcgaggatggaaactgcgaggcaggggagggaagcgggctgtttggccaccacctccctagtgctgcaggcgaccctgtcacactaactcctggcagcccagtgaggtggacggcaccggccccacctgcagatgagggaaatgaagctcggaggagttccgtgatttgcttgcttcacactgtggtagcctggccacgaaagaaccaggattcccgacttcgggattctttccaccacacactttcgtccctaaggggtggggggcggggggagaataaaataaccgcggaaaaggaaccacttacatgtgtctagcgcttcctagaggctacccaggatatgcgcccaccacccggccgggagtgcagagatttgaagtccaggttctaccccgggctccgagtactactgcgtgactttatgcgagtgtccgccgccttctgggcttgttttcccggaagcaactcggcgcggatggagtgtgtgtgtgcgcgcgcgcgcgcgttatgttgtgcgtgttgtgttaagcgtgtgcgtgttgtccgggggcgggagggggagtagactaacaccggggttccccgagtttcggatcgcctacacgcttgttcccatctggaccctgttacccaccaattgcgcccactataaaaactgcccctccgaggcaaagctgtgaacccccgcgccctttcccccacggtcccggaggatgaagtggggtgcaacggagactcagctgagcgtccagtttcgggcaatacaaatctctcggcttctacgagcagccagacgaccccgcggaccgtcgctcctgaacttgaccgagatgcaaacttcggagtgttctcaacgtggggggccgactctcgggagaccgcccctaaacttaagtccccttaggctcgcccccacctgggacttcacagagccaccttaagggcggtattcccgcccccccggaagtgcgggggggtggcagcgtacttggattctcagcctccagccccgcgcggtggcggccgccggtggatgacttcgggccccacaagtggggaaacaacaaccacccctcgcccgcacccctggcccaaaacaactggccaggttccctggcctcccgggtccctgcatcccccgcatccccgtccgcagccgtgaacttgagcccccctccatcagaggttgcgagcgtccgcccgctcgcggcagccaccgtcactagacagtcaaaccccaagacgtcagcccacaatgcaccgggcgggccgggaaaaacggcccggggaggggaccggggaagagagggccgagaggcgtgcggcaggggggagggtaggagaaagaagggcccgactgtaggagggcagcggagcattacctcatcccgtgagcctccgcgggcccagagaagaatcttctagggtggagtctccatggtgacgggcgggcccgcccccctgagagcgacgcgagccaatgggaaggccttggggtgacatcatgggctatttttaggggttgactggtagcagataagtgttgagctcgggctggataagggctcagagttgcactgagtgtggctgaagcagcgaggcgggagtggaggtgcgcggagtcaggcagacagacagacacagccagccagccaggtcggcagtatagtccgaactgcaaatcttattttcttttcaccttctctctaactgcccagagctagcgcctgtggctcccgggctggtgtttcgggagtgtccagagagcctggtctccagccgcccccgggaggagagccctgctgcccaggcgctgttgacagcggcggaaagcagcggtacccacgcgcccgccgggggaagtcggcgagcggctgcagcagcaaagaactttcccggctgggaggaccggagacaagtggcagagtcccggagccaacttttgcaagcctttcctgcgtcttaggcttctccacggcggtaaagaccagaaggcggcggagagccacgcaagagaagaaggacgtgcgctcagcttcgctcgcaccggttgttgaacttgggcgagcgcgagccgcggctgccgggcgccccctccccctagcagcggaggaggggacaagtcgtcggagtccgggcggccaagacccgccgccggccggccactgcagggtccgcactgatccgctccgcggggagagccgctgctctgggaagtgagttcgcctgcggactccgaggaaccgctgcgcacgaagagcgctcagtgagtgaccgcgacttttcaaagccgggtagcgcgcgcgagtcgacaagtaagagtgcgggaggcatcttaattaaccctgcgctccctggagcgagctggtgaggagggcgcagcggggacgacagccagcgggtgcgtgcgctcttagagaaactttccctgtcaaaggctccggggggcgcgggtgtcccccgcttgccacagccctgttgcggccccgaaacttgtgcgcgcagcccaaactaacctcacgtgaagtgacggactgttctatgactgcaaagatggaaacgaccttctatgacgatgccctcaacgcctcgttcctcccgtccgagagcggaccttatggctacagtaaccccaagatcctgaaacagagcatgaccctgaacctggccgacccagtggggagcctgaagccgcacctccgcgccaagaactcggacctcctcacctcgcccgacgtggggctgctcaagctggcgtcgcccgagctggagcgcctgataatccagtccagcaacgggcacatcaccaccacgccgacccccacccagttcctgtgccccaagaacgtgacagatgagcaggagggcttcgccgagggcttcgtgcgcgccctggccgaactgcacagccagaacacgctgcccagcgtcacgtcggcggcgcagccggtcaacggggcaggcatggtggctcccgcggtagcctcggtggcagggggcagcggcagcggcggcttcagcgccagcctgcacagcgagccgccggtctacgcaaacctcagcaacttcaacccaggcgcgctgagcagcggcggcggggcgccctcctacggcgcggccggcctggcctttcccgcgcaaccccagcagcagcagcagccgccgcaccacctgccccagcagatgcccgtgcagcacccgcggctgcaggccctgaaggaggagcctcagacagtgcccgagatgcccggcgagacaccgcccctgtcccccatcgacatggagtcccaggagcggatcaaggcggagaggaagcgcatgaggaaccgcatcgctgcctccaagtgccgaaaaaggaagctggagagaatcgcccggctggaggaaaaagtgaaaaccttgaaagctcagaactcggagctggcgtccacggccaacatgctcagggaacaggtggcacagcttaaacagaaagtcatgaaccacgttaacagtgggtgccaactcatgctaacgcagcagttgcaaacattttgaagagagaccgtcgggggctgaggggcaacgaagaaaaaaaataacacagagagacagacttgagaacttgacaagttgcgacggagagaaaaaagaagtgtccgagaactaaagccaagggtatccaagttggactgggttgcgtcctgacggcgcccccagtgtgcacgagtgggaaggacttggcgcgccctcccttggcgtggagccagggagcggccgcctgcgggctgccccgctttgcggacgggctgtccccgcgcgaacggaacgttggacttttcgttaacattgaccaagaactgcatggacctaacattcgatctcattcagtattaaaggggggagggggagggggttacaaactgcaatagagactgtagattgcttctgtagtactccttaagaacacaaagcggggggagggttggggaggggcggcaggagggaggtttgtgagagcgaggctgagcctacagatgaactctttctggcctgccttcgttaactgtgtatgtacatatatatattttttaatttgatgaaagctgattactgtcaataaacagcttcatgcctttgtaagttatttcttgtttgtttgtttgggtatcctgcccagtgttgtttgtaaataagagatttggagcactctgagtttaccatttgtaataaagtatataatttttttatgttttgtttctgaaaattccagaaaggatatttaagaaaatacaataaactattggaaagtactcccctaacctcttttctgcatcatctgtagatactagctatctaggtggagttgaaagagttaagaatgtcgattaaaatcactctcagtgcttcttactattaagcagtaaaaactgttctctattagactttagaaataaatgtacctgatgtacctgatgctatggtcaggttatactcctcctcccccagctatctatatggaattgcttaccaaaggatagtgcgatgtttcaggaggctggaggaaggggggttgcagtggagagggacagcccactgagaagtcaaacatttcaaagtttggattgtatcaagtggcatgtgctgtgaccatttataatgttagtagaaattttacaataggtgcttattctcaaagcaggaattggtggcagattttacaaaagatgtatccttccaatttggaatcttctctttgacaattcctagataaaaagatggcctttgcttatgaatatttataacagcattcttgtcacaataaatgtattcaaataccaataacagatcttgaattgcttccctttactacttttttcttcccaagttatatactgaagtttttatttttagttgctgaggttaacattgctgcaatctgaagtgatttgaaaattaagaagcaaagaatttaggaagagtcaaactagaagttgtgatctgaatgaaacagtctcccaatttcattaattctttccctctttctccatctctatctctctctctactacctcacccccaaataaacccctatgcctatggaaactaacagtttagcattttgggtctgtctgtagcttatttcttaatttgtttctaaaataatcaaccttgtttaaatatagaataagtctcaaaagatagtaatctaatactatggaaaagattcacaagagaaaacatgaactagtactaactcaatgattacatgcgtaaatcaaacctcagctctggggaaatgggaaacttgaattctacctacagatataacttaggagatcaacaaggcagtgcttaacaagggaacaattttttgcttggttgcttttcataccaagagccagtgtgattatcaggcagcaaaagcaatttgatatccaggaatatttcacaaaccactaattgagtcagggctgtttgctcattagcagtgttctagtacccagtaggtctgggagtgctaatatcctgcctgtggctgtaaatccaaatacacaaagagtttctccttaggagtatatctaggagtggaagagattggacaggcttgttagcttcggatcctttgtaataacacttcttgaacaaagggttactgggagcagagcccagtttgccaaactgaatttgccgatgtcagcaacccggaaggtgagatgattttgaccatatgtagaaatagcagagggacaataaagcattttggggtggggctctgtggaagctaaacaagagccaactagaaaaaataagcaggctggggaattaattacctgcaaagg

SEQ ID NO: 29 - DNA, 8244 bp, Homo Sapiens
ttctaaatatattcaccatttcgacgggtcacaataattttcttggacgttaatttccggggacgtcaaaacacatcagtcccggcgggcttttccagacttacactatgtggcctggggccccagatgtgctttctcccaggctctggacagttttatacaccccctccaggtcccacagatttacaggccactaacccgggttccctaattttaaagacgaagcccttggtccgtggtggtcgcgctgaccaatttgcctggctccccaggatgtggacagtgccttttccacatttaggcattgtttccaaaacaagtggaactttcccgcataattttgaatattaactccagggtctcctaagcttactgtttcccgcacacgtccgccccattccgcgcccccccaccccacccccgcgccccttcccgttcacctcagcatgggacatttgctgttgggtcccgcaaatctattcacactaacctgggttccctaaactttacacgttgaatcccaagtccctcatgacactcagcagggctggaaggttggaaccctcagagtatgaaaattgcttcccataccttcccccaaattcggtcattacacccagagcatgttgaatccttttctgaatcataaacgacctgccctctgattgtctgagtttcataaaatggagggatttccccagtgattccccaaagctattgagaatgttgtgggtgtgtgagtcacaaagctttggggcattaacgtctatggctctatatgctgcctggccacgaatcaggtcccttaagatgtagacagtgccacccaggtccctggagcacactgagcagttaccaggaggtgctcaagtgtgacccaggattctccaggtccccccaaatcacacagggtctcccgggtccctctgggctacaccaagcacaaaaggaccccttgggcagagcctacttttatttctgttatgccaggtgttgctaacggccccagttcccaaacattccgagcactttctctgcatcacaacatattgactattaaacaattctctgggtcccaggagcttcataacaagaatcttgcttttctaaaattcaggcattggtctgaaaccccaacggccaggatcacactggacccttttcctggtcccccatacttggatgttctggacgctgccctccaggccctctaggaacattcagcattgccctcggatcacaggacagcactgatttcttgggctccaaacaacccactgagtcatctcaaagttaagcaatatttccttcaaacacactgcacactccctatcacaaaatctgaaaattcctaagtcctaagacctaggaattctgaatcccctttctttaaaatgtacatatggacccccaagtcctccaaggactctgagcaacttccctagatctttagattcaaaaacgattttcctggagcccccaaattgcggtattgtctcccagccttccaaagcaaattgagatttttttcccttcacaaaacaattgaggttttttttttttttaatactgatttatgagtctcctgactttatggtccctgccctgggtccccctacatttagaaaatgttccatggacccccaaagcacactaaaaaatgtccctgggtcccaagaaatcccaggcatggaaaaacctgcgacctataagtttcctagctactaactaggtttccagaaatttagatatcaaatctccattgggtaatttccatgtgtcccaaaaacttgaaatgtgtttcactggggctcccccaaatgcagacgacatccaggaaaatatatagtctttttcttatttaccaaaaataagctaatggaaatcatttaaaaattagcatagaaaaataatactgattttatatttttttattttttattttgctttccccaaatgtactgatcacactccaggctcccccaaaatctagacagtgctttcttccatctctgaagggtgttaaaacctttccctgaagccacagtaattatgaaggttattttttccccggctgctgccagcgtccaggccactaacttatattcttaagatgtgaaaattaatctcagcttccccctaacacaccaagaatgtgtttggatccccaaaatgtgttccttgctttcatctgccaattttacgtaatatggctctacggcaaaattcccaatttcatatggagaattttctttaactacccctcctcacaaattggtcccccaagctagctggcccctatttgagacctctttctctatgttcccaattgcatggagcaacttctctcatcccccaaacctgtaatctatttttctggagtctcgagtttagtcattaatcacggttcccacattaacggagtccccggggtcccctcctccaggacacccattcgctaagcccgcaaggcagaaagaactctgccttgcgttccccaaaatttgggcattgttcccggctcgccggccacccactgcagcttccccaaccccgcgcacagcgggcactggtttcgggcctctctgtctcctacgaagtccccagagcaactcggatttgggaaatttctctctagcgttgcccaaacacacttgggtcggccgcgcgccctcaggacgtggacagggagggcttccccgtgtccaggaaagcgaccgggcattgcccccagtctcccccaaatttgggcattgtccccgggtcttccaacggactgggcgttgctcccggacactgaggactggccccggggtctcgctcaccttcagcagcgtccaccgcctgccacagagcgttcgatcgctcgctgcctgagctcctggtgcgcccgcggacgcagcctccagcttcgcggtgagctccccgccgcgccgatcccctccgcctctgcgcccctgaccggctctcggcccgcatctgctgctgtcccgccggtgctggcgctcgtctccggctgccgccggggaggccggcgtggggcgcgggacacggctgcggacttgcggctggcggctgcgctcgctcctgctgggcgccccgaaatccgcgccactttcgtttgctcattgcaaagatctcattcgtggggaaagcggctggagggtcccaaagtggggcgggcagggggctggggcgagggacgcggaggagaggcgctcccgccgggcggtaaagtgcctctagcccgcgggcctaggactccgccgggaggcgcgcgcggagcgcgggcgaagtgattgatggcggagcgaggggggcgaggggggccaggggggcgcgagattccgccggcggccccttccccttggctaggcttaggcggcggggggctggcggggtgcgggattttgtgcgtggtttttgacttggtaaaaatcacagtgctttcttacatcgttcaaactctccaggagatggtttccccagacccccaaattatcgtggtggcccccgagaccgaactcgcgtctatgcaagtccaacgcactgaggacggggtaaccattatccagatattttgggtgggccgcaaaggcgagctacttagacgcaccccggtgagctcggccatgcaggtaggatttgagctgtgtttcccgccctgatcctctctcctctggcggccggagcctccgtaggctccaagcctggcccagattcggcccggcgcagccggccttccgcgcgtcccgcacctggcgggggctccggggctccggcgcggcaccggggggcgctcgggatctggctgaggctccaagcgccgcgtggccggctccttctgctggggcaggtggcggctgcgcgccccgcccgagcccaggggccccctcagccgcaacaaccagcaaggaccccccgactcagccccaagccacctgcatctgcactcagacggggcgcacccgcagtgcagcctcctggtggggcgctgggagcccgcctgcccctgcctgcccggagaccccagctcacgagcacaggccgcccgggcaccccagaaacccgggatggggcccctgaattctctagaacgggcattcagcatggccttggcgctctgcggctccctgccccccacccagcctcgcccccgcgcaccccccagcccctgcgaccgccgcccccccccccggggccccagggcccccagcccgcaccccccgccccgctcttggctcgggttgcgggggcgggccgggggcggggcgagggctccgcgggcgcccattggcgcgggcgcgaggccagcgaggcccgcgcgggccctgggccgcgggctggcgcgactataagagccgggcgtgggcgcccgcagttcgcctgctctccggcggagctgcgtgaggcccggccggccccggccccccccttccggccgcccccgcctcctggcccacgcctgcccgcgctctgcccaccagcgcctccatcgggcaaggcggccccgcgtcgacgccgcccgctgcctcgctgctgactcccgtcccgggcgccgtccgcggggtcgcgctccgccgggcctgcggattccccgccgcctcctcttcatctacctcaactccccccatccccgcttcgcccgaggaggcggttccccccgcaggcagtccggctcgcaggccgccggcgttgtcaccccccccgcgctccccctccagccctccccccggcgcgcagcctcgggccgctcccctttccgcgctgcgtcccggagcggccccggtgccgccaccgcctgtccccctcccgaggcccgggctcgcgacggcagagggctccgtcggcccaaaccgagctgggcgcccgcggtccgggtgcagcctccactccgccccccagtcaccgcctcccccggcccctcgacgtggcgcccttccctccgcttctctgtgctccccgcgcccctcttggcgtctggccccggcccccgctctttctcccgcaaccttcccttcgctccctcccgtcccccccagctcctagcctccgactccctccccccctcacgcccgccctctcgccttcgccgaaccaaagtggattaattacacgctttctgtttctctccgtgctgttctctcccgctgtgcgcctgcccgcctctcgctgtcctctctccccctcgccctctcttcggcccccccctttcacgttcactctgtctctcccactatctctgcccccctctatccttgatacaacagctgacctcatttcccgataccttttcccccccgaaaagtacaacatctggcccgccccagcccgaagacagcccgtcctccctggacaatcagacgaattctccccccccccccaaaaaaaagccatccccccgctctgccccgtcgcacattcggcccccgcgactcggccagagcggcgctggcagaggagtgtccggcaggagggccaacgcccgctgttcggtttgcgacacgcagcagggaggtgggcggcagcgtcgccggcttccaggtaagcggcgtgtgcgggccgggccggggccggggctggggcggcgcgggcttgcgccggacgcccggcccttcctccgcccgctcccggcccggggcctgcggggctcggcggggcggctgagcccgggggggaggaggaggaggaggaggaggacggacggctgcgggtcccgttccctgcgcggagccccgcgctcaccctggcggcggagctgggggtggggtgggggcgtcgggaagggccgagggaggtgtgaggtgtctgcaggggcgacttcccggtcggtctgtgggtgcagggggtgccgcctcacatgtgtgattcgtgccttgcgggccctggcctccggggtgctgggtaacgaggaggggcgcggagccgcagaagcccaccctggtatgttgacgcggtgccagcgagaccgcgagaggaagacgggggtgggcggggccaggatggagaggggccgagttggcaggagtcatggcagacgccacattcgcgacatctcccccacaccccctctggctctgtccgcaacatttccaaacaggagtcccgggagagggggagaggggctgctggtctgaggctaagaagggcagagccttcgacccggagagaggccgcggcccctgcccagtgggcagcgtggaagtttccatacaaggaggtgggaaggagacccccccccccttcactgccctgtgcagagatgagccgggggtgcaggatgggagcccatggcacttcgctacgggatggtccagggctcccggttgggggtgcaggagagaagagactggctgggaggagggagagggcgggagcaaaggcgcgggggagtggtcagcagggagaggggtggggggtagggtggagcccgggctgggaggagtcggctcacacataaaagctgaggcactgaccagcctgcaaactggacattagcttctcctgtgaaagagacttccagcttcctcctcctcctcttcctcctcctcctcctgccccagcgagccttctgctgagctgtaggtaaccagggctgtggagtgaggacccccgctgccatcccactccagcctgaggcagggcagcagggggcacggcccacgcctgggcctcgggccctgcagccgccagcccgctgcctctcggacagcacccccctcccctcttttcctctgcccctgcccccacctggtctctgctccctcacctgctccttccctttctgttccttcccttcggccccctccttgcccagctcagggcttttcctgggccctcacctgctccgcaccgctgcatgcttcctgtcctgctttctgccggtcccctgacccggacctccaagttcagagtggtggggcttgttgcggaagcgcggcgagggctagagtggccagctggcggagtgtgctcttagaatttggaagggggtggcagagggggcggtgagaggactggccagggtccagtcaaggagatgaccaaggaggctttcagatcctcggcgcagctgcccactagtctttagagagggcatgcaaagttgtgcttctgtcccactgcctgctcagtcgctcacataatttattgcatcaaaaactcccctgggtctgcggagcgaaggctggggctgcccgcctggagggttccaccttctgcaggggcagggccaacttgctgtggtggctcccggcctcccacccccgagtgggttaacccggccctgtggccctgcagcctgtggagggggtgtgtcctaagactggcctccccttccagattgtagtctggggaacctggtgtcggacttcccaggtggcctgagctggtctctccagctcccacggggagagtttggtagcgcaaatagggagatgttctggaggcccctggccttactggttcgatttgaggcctggaaaggaggctctgggcgtgtgtgtgtgtgtttgggggtacccaaggcagactggagttggagaactgggtgactgggaaaacaaggtttctagagcatgggtggcgtggttgtgttaaccattggagtccttgacccaggcctggctcagctgcagactggaaaggtggaaaagccagggggaggggcggggctggcccagcaggactggcctgctgctttgagggcgatggtcctcctggaccccccctgctcagctgggggttgtggggaggaagggactggtcctcctggatgcacatgctctgtaggggtggggctgtctgccatcttggctggcgctggaggcctgagaagtggcgatgtgacgctgggctggccctgcccccatggtgtcataggacggaggccaggtcgggtgtccagcctgggcccctgcagctgtggatgccgctgagctcctgcaataatgaccgtggagatggtcacccctcgtgtaaaattactagtgcttcttgcaaatggaaggaactgggccttttctgtgtgcttctggacgcttcattctgcacatggccctgcgccctcacctcggcattatgacctgtgtgttacttttgtaataaaaataatgtttataggaaagccgtgctttcaattttcaactgaatttgtaggttggcaaatttggtttgggaggggcacctctggcctggggcttggcctggctgccccgctcacgccacttctctcccgcccccaga

SEQ ID NO: 30 - DNA, 16842 bp, Homo Sapiens
cctcccaaagtgctgggattacaggcgtgagccactgcacctggcctgttatttatgtatttatttttttttgagacaagttcttgctatgttgcccaggctggcctcaaactcctaggctcaagagatcctcccaaagttctgggattacaggtgtgagccactgtgcataaccctgaagtggttaattttaataatacatttactttagcctaacatatccaaaattacatcatttcaacatgcaatcattattaaaattattaatgagatattttattttatttttatttatttatttttttgagacggagtctcgctctgtctcccaggctggagtgcggtggcgcgatcttggttcactgcaagctccgcctcctgggttcacgcctttctcctgtctcagcctcccgagtagctgggattacaggtgcccgccaccacgcccagctaatttttgtatttttagtagagaccaggtttcaccacgttggccaggatggtctcgaactcctgacctcgtgatcagcccaccttggcctcctaaagtgctgggattacaggcgtgagccactgtgtctggccagtgagatattttatttgtgccctttttttttttttttgagaccgagtctcactgtgttgcccaggctgcagtgcagtggcacaatcttggctcactgcaacctctgcctcccaggttcaagcgattctcttacctcagcctcctgagtagctgggattacaggcgggcgccacgacacctggctagtttttgtatttttagtagagacgggggttttaccatgttgcccaggctggtcttgaactcttgacctcaggtgatcacctgccttggccccccaaagtgctgggattacaggcaaaagccgccataccaggcccatttttttttctttcgagacggagtctcattgttgcccaaggtggagtgcaatggcaagatctcagctccctgcaacctctgcctcctgggttcaagcgatcctcctgcctcagcctcccaagtagctgagattacgggcgcccgccaccacgcctggctaatttttgtatttttagtagagacagggttttaccacgttggccagactggtctcaaactcctgacctcgggtgatccatccgcctcggcctcccaaagtgctgggattacaggtgtgaactaccgtgcctggcaggcccatttttaatttttctaactttggaaattcagtgtgtagggcaggcatggtgcctcatgcctgtaatcccagaactttgggaggccgaggcaggtggatcacctgaggttaggagttcgggaccagcctgaacaatatggtgaaaccctgtctctattgaaaatccaaaaattatccagccatggtggtgtatgcctgtagtcccagctactccagaggctgagacaggagaattgcttgaatctgggaagcagaggttgcagtgaaccaagatcatgccattgcactccagcccgggcaacagagcgagactccgtctcaaaaaaaaaaaaagagagtcagtgtggagggaagtgtctctgttgggtccgggtgctctgtgggactctgaggaaaagctcgcaccaggtagatgctgttctgtccccatgggtaaaggacaccccaacaaaccgaggagcaaaatgtcctcgtatgccctcttcgcgcagacctgccaggaagagcacaagaagaaacacccggactcttctgtcaatttcgtggaattctccaagaagtgtttggagagatggaagaccacgtctgcaaaggagaagtgaagtttgaagagaaggcaaaaagtgacaaagctcgctgtgacagggagattaaaaattacattcctccgaaatgtaagaaagggtaagaaaggaaagaaaaaggatcgcaatgctcctagaaggccaccatctgccttcttcctgttttgctctgaacatcgcccaaagatcaaaagtggacacccaggcctatttgtcgtggaaactgcaaagaaactgggtgaaatgtggtctgggcagtcagccaaagataaacaaccatatgagcagaaagcagttaagctacaggagagatatgaaaagggtattgctgcatatcgtgctaagggcaaaagtgaagcaggaaagaagggctcaaagaagaacaaaccagaagatgaggaggaggaggaggagaaagaagatgaagatgaggaggaagagggtgaagatgaagaataaatggctatcctttaatgatgcctgtgcagtgggcttgttttgctaagaatgtgaattctagtacagctcagtattagcttcagtataaaactgtacaaattttcgtatagctcataagattctctgtacagaaaatacttttcttttcttttcttttttttgagacagagtttcgctcttgttgcctaggctggagtgcaatggcgtgatctcggctcaccgcaacctccgcctcccgggtcctggttcaagcagttctcctgcctcagcctcctgagtagctgggattacaggcacatgccaccacgctcagctaatttttgtatttttagtagagatggggtttcaccatgttggccaggctgctttcaaactcctgacctcgtgatccgcctgcttcggcctcccaaaatactgggattacaggtgtgagccaccgcaccctgcctaatgtccctaaatatttaatggtttttaaaaaatttattgtgtatggcagcacagcacacttgtaggaattagtatcaacagtacatcttgcgttttttaagatgctgcattttttaacattttgtaataaaattatgcgtatcaaaaaaacaaagaaattccgtgtgtagttcacactcacagcacatctccgtccaggcacttgagagaatgactaggaggggttcttggaggaggtggtctttgaacggagaatccatcttcaaggattctgtctgtaatggtcaccaagtatttcctgagtcacttccatgtgtcctgcagttctctgaaggggcgtgggacctaccgatgccaattatccagcattatctccagattccaagaagttggggtgtgagccagcaatcagtacagaaaagagataccaaaataagtttgagttggggagtgttccttcaacttcagttttctggaagagatcttttttttttttttgagacagagtttcgctcttattgcccaagctggagtgcagtggcacgatctcggctcaccgcaacctcctcctcccgggttcaagcgattctcctccctcagccttctgagtagctgggattacagacatgcacctgtaatttctactaaaaatacaaaaattagccgggcgtggtggcgcacgcctgtaatctcagctactggggaggctgaggcaggagaatcgcttgaaaccaggaggcggagattgtaccaagatagtttgttccagctaaacaacctggcgctagtgcaggaaaaggtggaaggcacggggctagcacaggagggttcaatattttcaaccttatcaagccatattttggcaactcttgtttttcacgagaagcccccgctgggcttgtcccagcgctgtcctgaggcttcccccatgagttccgatagggcagaggccgccctgagcgtttctctttcccctggtccaagagtggctcaaaagaaggatttttgactggaattggccactttgtgttactttttgacccttgacctcgccccaaagggggatgcgggggaggggctctggtaggggtggccccgctccttccaggtccgcaagcccaggttcccgcccaccgggctcagcccaccctgcggccgttcagggaggccgttggcacccgtgacctacgacccccttcccgagccccaccgaggtcacagccgtggcctcgtctccccatgcctgcttcccgccccctgcccgtgacgggcgtctccgaggaccaatgagcgcgctgtatccacccctcgggcggggccaagcgccgaccaatcgccgctcgggcgcccggccgggtccaaacgctccaatcgtcagcggcggcggggcgggcagagggccggggatggcaggttcaaccaacgggtgggcacgtcgtcctcgcgaggaggcgtgccctgcggccgggcgtgcggtgtccgcggcggcgcagggagggggagggaggtaaacaagatggcggcggcgtgtcgggcgcggaagggggaggcggcccggggcgcccgcgagtgaggcgcggggcggcgaagggagcgcgggtggcggcacttgctgccgcggccttggatgggctgggcccccctcgccgctccgcctcctccacacgcgcggcggccgcggcgagggggacgcgccgcccggggcccggcaccttcgggaaccccccggcccggagcctgcggcctgcgccgcctcggccgccgggagccccgtggagcccccgccgccgcgccgccccgcggaccggacgctgagggcactcggggcggggcgcgcgctcgggcagacgtttgcggggaggggggcgcctgccgggccccggcgaccaccttgggggtcgcgggccggctcggggggcgcccagtgcgggccctcgcgggcgccgggcagcgaccagccctgagcggagctgttggccgcggcgggaggcctcccggacgcccccagccccccgaacgctcgcccgggccggcgggagtcggcgccccccgggaggtccgctcggtcgtccgcggcggagcgtttgctcctgggacaggcggtgggaccggggcgtcgccggagacgcccccagcgaagttgggctctccaggtgtgggggtcccggggggtagcgacgtcgcggacccggcctgtgggatgggcggcccggagaagactgcgctcggccgtgttcatacttgtccgtgggcctgaggtccccggaggatgacctagcactgaaaagccccggccggcctccccagggtccccgaggacgaagttgaccctgaccgggccgtctcccagttctgaggcccgggtcccactggaactcgcgtctgagccgccgtcccggacccccggtgcccgccggtccgcagaccctgcaccgggcttggactcgcagccgggactgacgtgtagaacaatcgtttctgttggaagaagggtttttcccttccttttggggtttttgttgccttttttttttcttttttctttgtaaaattttggagaagggaagtcggaacacaaggaaggaccgctcacccgcggactcagggctggcggcgggactccaggaccctgggtccagcatggaggtggtggacccgcagcagctgggcatgttcacggagggcgagctgatgtcggtgggtatggacacgttcatccaccgcatcgactccaccgaggtcatctaccagccgcgccgcaagcgggccaagctcatcggcaagtacctgatgggggacctgctgggggaaggctcttacggcaaggtgaaggaggtgctggactcggagacgctgtgcaggagggccgtcaagatcctcaagaagaagaagttgcgaaggatccccaacggggaggccaacgtgaagaagtaagtatggcttgctggggtcggggccgggccgggccagtcacggtgctgatggttctgtcttccttccttctctcctccctccctcccttacttcctcttaacaccctgagctggacccgtctggcgcctgtgtcctccgtgccagggagagcgtggttgggggcctgcgttacggactttcactcaggcaaggccagttgtcgcagcggggcgtgcgtttgcatgggctcttggactccagttaaaatgccctggtagcgaaaccctcctgagaagggagcggcccccaatcccctaagactagccccttggctcccccagctgtccaaggagcagaggcgcccagtggaatcagcctgtgtttgtttgggccccgagagtttgtgtgcggccgccaacacgttttctgcgcagtgtgtggccgttaccggggccaggcgaaatgtgatttgtttatcctgtcagaggggaaccctgggctgccaaaaataactgtttgcaccggcttatcagtcagcaggagggaaacgtagcctttcctcatttgccagggatgtgacgctggaagcatccctggcccccggggctggaagccctgcccgagggggactgtgcctccctcccgaattgcatccggaagaccttacttttccaactgacttcttcaggcacggggctgccgctgggcatcccggacgcctctgcatctgtgcgcggagaagctcctacctagggcagcactggccggcctgagcctctcccagctggtgggggtggccgggggtgtccctgccttatcgcagccagacacgctgcacctgccgccgcctggcgggccctgcccaggccctgctcctttcccagccttcttaactttcaaaactttgcctcctgtttccaagaaaggaccttatctgctgggctaggcctcgagggactggcaaggacaccctgcgcagggcaccatgaccttggaaggaggtccggggaggggctgctgcggtgtctgctctcaccttcctcctgctcaggggccctggggctcctgccgtgtctgctctcacctctctcctgctcaggggccctggggctcacgtacatttttttttttttttttttgagacggagtctcgctctgttccccaggctggagtgcagtggcgcgaactgggctcactgcaagctccgcctcccgggttcatgccattctcctgcctcagcctcccgagtagctgggactacaggcacccgccaccacgcccggccaattttttgtatttttcagtagagacggggtttcaccgtgttagccaggatggtctcaatctcctgacctcgtgatccgcccgcctcggcctcccaaagtgctggtactacaggcgtgagtcaacgcgtgcggcctttttttttttttttttttttttttttgagacggagtttcactcttgttgctcaggctggagtgcagtggagtggtcttggctcactgcaatctccgccccctgggttcaagtgattctcgtgcctcagcctcccgagtagctgggattacaggtgcctgccacagtgcccagctaattttttttttttttttttagtagagacggggtttcaccatcttggccaggttggtcttgaacttctgacctcgtgatccacctgcctcagcctcccaaagtgctgggattaaaggcgtgagccaccgcgcccggccagcacgcttcttaatcagcatgcaggctgtgacatgcggaaaccaggggcacaggctctgaagtttgtactctggagctggagcagtcagggttaaatgggagcggctgggaagggtgtgtttccacgaggcctttctgatgtctcagtgcccagtctggacccgggtagaaggtgtggccagtgccttgagtcagtggagcagttgcctgtgcctggtctctgtgagatgggttggtcaggggctaggcagagcctgtgcctggtctctgtgagatgggttggtcaggggctaggcagagcctgtgctgggggtagcaggtgccctctaaaggggccagtgacagtctctctcccagcagtgagaaacccacgcttaggggccgggcgcggtggctcacgcctgtaatcccagcactttgggaggctgaggtgggtggatcgcctgaggtcaggagttcgagaccagcctggccaacatggtgaaaccccatctctactaaaaatacaaaagttagccgagtgtggtggcgtgtgcctgtaatcccagctactcgggaggctgaggcagaacattgctggagcctgggaggcggagcttgcggtgacccgagatcgcaccattgcgctccagcctgggcgacacagcgagactctgtctcaaaaataaataaataaataaataaataaataaataaataaataaatctggcttgagttttgacaaatgtatatgcagggtcaatgggaagacagacgctggagggtggaagcctgactgtgagagtgagccccctgctttcctgaacagtcagtggaggaggtcctgggagctcaggtgagcacctgaacggtagggcagagcctgagggtcttggtggagacaggcaagaaggttgcaggaacctagtctggcccagtgcctgggagaacgggagggaacacggaggcagggaggcagaggggttggcaggacctggactggactgtgcgtcgcagctacccacagcttgaccccactgccttgaagtgagtgatgcaccctcactagtgttcagcgtccaatttcatcctggccctgagtgtgtaacggctttgcccttgcggggccccctgggatgaggggtgagccctgtcccttcctggtcactgtctgccatcaggagctgccccgcttacagctgtgattcaggagccactgcatttcctccagccccctgggtgctgccagggggtcctcctattctgggagctggtgtgttctgactggaggctgccatgtgcagagtgctgtcaaggagaaggggtgtccactgcccagccctgaggcccaaggccttggccagccttgctgccagcgctgcagggaaaaagcctcctttgtgtgtgggaagtttaataaactccgctcagattgtgtctcgcagcgagtgtctggaaccttccagacaagcctcaggcgtccggtcctccagttggtgtggaaagcgtgggcgatcaccaaggggggtgggttggggcagatggagccggcgtgagtcccgtctcttcccttccttcccagaaaggcagccctggagtccatgccttgtcccgctctcaccggcaaaaagtataatcttattagaaataggaaagttccaaaaagcatcaatgagttaaaaagagggctgggcatgttcggtcatgcctgtaatcccagcactttgggaggccaaggcgggtggatcacccgaggttgggagttagcctgaccaacatggtgaaaccctgtctctactaaaaatacaaaattagctgagtgtggtggcgcacgcctgtaatcccagctactctggaggctgaggcaggagaatcacttgaacccgggaagcagaggttgcggtgagccaagaccatgccattgcactccagcctgggtaacaagagtgaaactccgtctcgaaaaaaaaaagggctggggccgggcgtggtggctcacgcctgtaatcccagcactttgggaggccgaggcggtttgatcacaaggtcagaagtttgagaccagcgtggccaacatggtgaaaccctctctctactaaaaatagaaaaactagccaggtgtggtggcacatgccaataatcccagctacttcatctgaggtcaggagttcaagaccagcctggccaatatggcgaaactccgtctctactacaaatacaaaaattagccaggcgtggtggcgcgcgcctgtagtccagctactggggaagctgaagcaaggagaatcgcttgaacctgggaggcggaggttgcggtgagccgagatcgcatcattgcattccaggctgggcaagcctaggagagaagagcgaaattgtgtctcaaaaaaacaattaattaaaataaaatcagtgccataggctgtttctggtaggcagtgggttcctagggtggagcagggaagggctggaaagggtcgcctgtgcccagcccgactccccgtgcttctcgggggacagcacggctagctgctgctgcggagcccacagtggggttctgggggggggggtgcaggcagaaggccgccatgcctccctccccctttccaccccagtgagagtgggctcgaaggcagggagtctgcccgccttgtggagcctccgcagaggcacccagggctgccgtgagcgcacagcctggcggtgtcccacggccctgccctttcctgtcacttccacctgttgcaaaacactgtgctttcgtatcttttctttctacctgtttggaaatgtgaaaatcactgctgccgtaggaaacgggcccagatccgggctgtggctctcccatccgcaccgcccccgcggtgtccagccaggaggtgggaggtgggcggcactcagtgtgcctggttgcggcgatgattggcagatgcttggacctatggtaaagaggattttcgcgagctgggagtcagtcctggactttgtaggtctttacatcccaggcggcctttatggggttccagcatctgctgaggcccctgcgccagccatgtgaggcctgggtgtcctcgaggcctctgtttgtgcccctctctgggcagcgggagggagagctctgagacccagagggagctcaggggctgggcagccgcagaacagcgggggtaatgggtccactgggggttctgggctgtgcacacagtgggcttccggtgcccagccagctggggcaggcctggaatgttggttcctctctcaggatctggggcgctgctgtagctgtcggggaatcagtgaggcggctggacggcccgtatatcccacaaacgccaccgtattgctcaaactggactcaattttcttaacacctttttttttttttttttttttttttttggagacagggtctcactgtatcgccgaggctggagtgcagtggcgcaatcatagctctgggctcaggtgaccctcctgcccccaaggtagctgggactgcagatgtgcaccaccacacccgactagttttttgtagagatggggtttcgccatgttgtccaggctggtctcaaactcctagactcaagctatccgcctgcctgggcctcccagagtgctgggattacaggtatgagccactgcttcgccacgttcacctttatttacttatttatttatttttgagacggagtctcgctctgtcccccaggctggagtgctgtggcacgatcttggctcactgcaagctccgcttcagcctcccaagtaagctggaactacaggtgcctgccaccaagcctggctaattttgtttttgtatttttagtagagacggggtttcaccgtgttagccagtatggtctcgatctcctgaccttgtgatccgcccgcctcggcctcccaaagtcctgggattacaggcttgagtcactgtgcccggcccacctttttattttttattttatagagacaagggcttgctgtgttgcccaggctggtcttgaacccctgaccttaagtaatcctctctggcctcccaaagtgctgggattacaggtgtaagccatagtactgggcctaaagttcaccttttttttttttttttttttttttgagatggagtctcgctctgtcacccaggctggagtgcagtggcgtgatcttggctcactgcaagctctgcctcccgggttcacaccattctcctgcctcagcctcccgaatagctgggactacaggcgcctgccaccatgcccggctaatttttttgtatttttagtagagatggggtttcactgtgttagccaggatggtctcgatctcctgacctcgtgatctgcctgcctcggcctcccaaagtgctggggttacaggtgtgagccaccgcacccggcaaagttcacctttttaaagtgtgtaattcagtggcatatagtacattgacagagttgcacaactatcacctctatcagcttccagaacattcttgttaccccagaaggaaaccccgtctctgtcagccatcactccccattccctccccagtcccggcacccacgcattcccttcctgcctctggattggcctgtcctgaacatttcacacgagtggtgtcacacaccgcgtggccttttgcgtccggcttgtctcacggagtgtgctgtcctcaaggggcatccgcgccgtggcctgggtccgaacctctctgctgttcacggctgcgtcactttccagtgtgtggagggccacgctgcgtttgactgctcatctgtggctggacacttgggctgctcccgcctctgcctgtgaattgtggctgctttggtgcacgtgtgctcagccggcgtccctctagaatccttgagggccttgtttcagccacatcaggagggattcagggaccagggcacgcgggtctggagctgggtgttcctgggtctccatgtgcctcccagtcctgctctgagccgtgggaggccggggcgagggccaggcccatctcttccctgtatgatctgtttctaggcagacggaggctcctagccccacctctctgtgagcttgagtggcgtttatgactctccttcctatttcctgtcctgctaatcaacaagtcagctaaacagtccatgctgcctgggcaagcccagtaggcccctaacgtggcacctcggagcggctggcgatgccccaagagccgggcttccccctcctggaggctcttcctgttcctcgccaagctcttaggtttcgctgggcctcctcttctgctctttttctggctggagacgtcagaggaagcctggcgatctagagaagctgatgtgcacccatcatcccggaggtgactgccaccaggcgggggtggctccacccccactcctcccctggcataaatcgggggacgcacgtgcctgcgcagaatgccttggtcccttttaattaaacagacaacccagtgtcccttggtctatgctgacctgctcaggagtgcctgggctcttccacgtttcagctgctgtgtgtcctgctgctgtgaagtgtccccgttgaggtggaggcagggcagggcgccttcggtgagggcgagtcctcctgtgcccgtttccccatctgtagaatgatggctcatggaggagacatggtgtcggcaggtggtggccggcgcagggaggtttccaggagggagtcctccaccctcatttgcttttagggccgtgcagcctcccgagcggcccccacgaggctctgaggctgcatgcaggttgagctcctggcctcactgcccctcctcagggttaggactgtgctggagcctgggtgggtgtggggtggtccctgcacaggcagcaggaggtgggccagagcggtgctggacctgaaggcccgtggctccctcagctccactgaggaggctggaatagtgtcctgggccaccttccctgccggtagccggctcctgctgagggagggggtgctttcgcctcctggtggagcatcaggctcttggggcctgtgcgtccgagcatctggcctctgctgtctgaaaacagcaccttccccgccccccggccaccgcatctcctctgaatagaaggcaagtcttgcctcccaggaatggcctgtgaccttcatcagcgggggaggttaggggcacacagagccctggggaacaaggggatctggggctgagccgggcctctcgggcccaccccgagctctcctgagcagcctggcaggcaggaaggcgctgggccccggggcctttgccgagcccagcctcaccctcagcgtccccctcaatgccctgggtgcctgccaggctgtggacacaggccctggccagttctataaataaccttgccgggccctgctgggaattggtgccaccaccacatagcccagagagaacggaaacacagggcttctcagcgagcagaccaggcctgcggtgaccagtggaagtgggggacgctttcagggctgggcagcccgacagggcaccgggcacagccaggggccggaaccagttgctcactggctccgcttctgggggactgtgtccctctgtgccccgtccccatcacaccttgctttcccttcatcctgctctcctagcccctccccagactggcggccccttgtccaggcccagccccagcacagcctgcagccctggcagagctcaggccttggccttctgaggttgccctgagggcagtgagcaatgagccctgggactggtgcactgggagggaaaggtgagccaaggcttcctgcaagaggcagccctgagctgggggtggggaaggctgggtcgtgggatacccctgacaccccaagttttttttttgagatggagtcttgctctgtcacccaggctggagtgcagtggtgagatctcgactctctgcaacctccgcctcccaggttcaagcgattctcctgcctcagcctcctgagtagctgggattacaggcgcccatcaccacgcccggctaatttttgtatttttagtagagacaaggtttcaccatgttggccaggctggtttcgaactcctgacctcaggtgatccacctcggcctcccatagtgtcgggattacaggcgtgagtcaccgcgcctggccccccagctgttttttatgctccatgcttgggcttcctgttaagaattaaaaaagaaaaaaaaaactatggagatggaatttacatactgtacaactcattcgttcacagtgtacaattcagtggcattaagtacattcacacggctgtgcaaccactacttctaattccagaacgttcggtcaccccaaaagcaagccccattcccattgtgtcactctccatcccctccaccagctcctggccactctgaatccacttcctggctctggattggcttgtcctggatattgcatagaaatgggatcctgtcggccgggcgcggtgactcacgagagcaagagatccagaccatcctggccaacatggtgaaaccccatctctactaaaaatacaaaaattagctgggcgtggttgcgggcacctgtagtcccagcgactcaggggctgagtcaggagaaatcgcttgaacccgggaggcagaggttgcagtgagctgagatcatgccattgcactctggcctggcgacagagtgagactccgtctccaaaaaaaaaaaaacaagaaatgggatcctgtcatcccagcgttttccgaggccgaggtgggcagatgacttgagcctagtagttcaaacgagaccagcctgggcagcacggtgaaactgtctctactaaaatacaaaaattagctgggcatggtagcacacgtctgtagtcccagctacttgcggggctgagatgggaggatcgcttgagcctgggaggtgcactccagcctgggcgacagggaaaccctgtctcaaaaaaaaaaaaaaaagtgcatcacacactgtgtgtcctttagtgtctcactgtgacatcctcaaggtgcagctaggctgtggctcgagtcagagcctcactggtttttgtggctgagtcttgttgagtgcgtggatgggctgtgctgatcctcgtctgtggaagggcccctgggtggttccacatctcggctgctgtgcgtcctgctgctgtgagcatctcgtgctccgtttctgcgtggcgtgtactgttcctcagggtgtgtacctgggagtggagctgctggctcacagggtaacagacctttggagaagctgcagacgcttccacgcccacccactgggtgtgaggaccttgctcctcgtcatttttgtttttgtttaattttttcttttatgagacagggtcttattctgttgtccaggctggagtgcagtagcacgatcacaggtaactacaggctcaagtgatcctcccacctgagcctcccgagtagctaggacttgaggcacgtacctccacacctggctaatttttgtatttttagtagagacagggtttcgccgtgttgctcaggctggtctcgaactcctgagctcaggtgatccacccgcctcggcctcctatagtgctgggagaaatgaagtgtctgcgacagggcggcagctgcagagggggctgtgctctctggcctgttgtgccccacccttgtgacaggcaggtgggcgtggccaactgggcggcagctgcagagggggcagtgacaggcgggtgggtgtggcaggaccccacaatgtctctttctgtggcgtctccttcttcgcctgccccttcctatgggccatccttccagctcacctgcggcccaccctccaaggagtgggaccctcggagttgggagcccttggctgcgtgggactgtactgtgtgacggagccatcaccagggctccaactcaccctggctcctgccacagtctgggctccatctgtgctaccattgcagtagtctggtttctaggaagcaaaactgttactgagttacaaagctcaattaagagtgtcctttgggaggccgaggcgggcggatcacaaggtcaggagatcgagaccatcctggccaacatggtgaaaccctgtctgtactaaaatacaaaaaaattagccggctgtggtgacacgtgcctgtagtcccagctactcgggaggctgaggcagggaaatcacttgaacctgggaggcagaggttgcagtgagctgagatcgggccaccgtgctccagcctagggacagagcaagactctgtctcagaaaaaaaaaaaagtgtcctaactgtgtcctccaaagccctcgccggccgatgacagactagagggcgctgtgctcccaccccctaccgccctgagcctggacgcgtggcccctgcagggccctttcccacagcactgtgaactcacagcttctctctagggaagggaggaggtacgccacttccacagggagatggggaggccgactccagggatccaggccatcatcctgacgttgggtcggctgatacacccctgtcctctctgtcccagg

SEQ ID NO: 31 - DNA, 1157 bp, Homo Sapiens
ggatcctgctccctctgaaggctccagggaagagtgtcctctgctccctccgaaggctccagggaagggtctgtcctcttaggcttctggtggcttgcaggtgcagccctccaatcctcctccccaagcggcctgctgcctataaggacacgagtcatactggatgaggggcccactaattgatggcttctgtaaagtccccatctccaaataaggtcacattgtgaggtactgggagttaggactccaacatagcttctctggtggacacaattcaactcctaataacgtccacacaaccccaagcagggcctggcaccctgtgtgctctctggagagcggctgagtcaggctctggcagtgtctaggccatcggtgactgcagcccctggacggcatcgcccaccacaggccctggaggctgcccccacggccccctgacagggtctctgctggtctgggggtccctgactaggggagcggccccaggaggggagagactcgcgctccgggctcagcgtagccgccccgagcaggaccgggattctcactaagcgggcgccgtcctacgacccccgcgcgctttcaggaccactcgggcacgtggcaggtcgcttgcacgcccgcggactatccctgtgacaggaaaaggtacgggccatttggcaaactaaggcacagagcctcaggcggaagctgggaaggcgccgcccggcttgtaccggccgaagggccatccgggtcaggcgcacagggcagcggcgctgccggaggaccagggccggcgtgccggcgtccagcgaggatgcgcagactgcctcaggcccggcgccgccgcactgggcatgcgccgacccggtcgggcgggaacaccccgccccgcccgggctccgccccagctccgcccccgcgcgccccggccccgcccccgcgcgctctcttgcttttctcaggtcctcggctccgccccgctctagaccccgccccacgccgccatccccgtgcccctcggccccgcccccgcgccccggatatgctgggacagcccgcgcccctagaacgctttgcgtcccgacgcccgcaggtcctcgcggtgcgcaccgtttgcgacttggtgagtgtctgggtcgcctcgctcccggaagagtgcggagctc

SEQ ID NO: 32 - DNA, 8093 bp, Homo Sapiens
ccatggaaggaaatgagatcagctagcgagctgacacagaacaaggcagtctaaaacaaatttttttaaaaatacgaagaacagatattgaagggaagaggtgcctgcaaagactaagaaagcacacctggagatggtatctcctcaaagctaaagtcatcaagtgttcaagtgtttcaaggagggtaagactattaacaaggacttagcatagtagagcaatttgagtggcaatacgggacactgggaatacaaatctgtcaagaaaactagtaggaatgagctataggacagtaactggtaaggacctaataattttttttttaatgtacgtattttaactatattcactgctacaacaggaccagtaacaactatatttatttaaaaaaaaaaagactgccatgcagttacagaattacttaatacagaaaacagtaaaatacacttttttctttttctttttttttttttttttttacaaacaagactagcttatagcaaattctctatagctaagggtcaatttaaaatccttggcttatatctccccctcactcaatgactacatgatgcaaactaattttattaacaccttaagcaaaacatactggaatttcacaaaatgtacaagatttcaatatttaaggaactggggttagaaagcagaagtggctttcaggtcttccagtctttctctcaagtaataaagctctgctgtgaatattcaaagctattgggaaattaccggtagatttttctgtttttttttttcggttttccactatgttgtttctctagatatgtaagcttactctattaaccaaaatctcagcttgaccattcttgataagtacctaatcgacatgtaactttttttctgccttaaatatgtataacaggacagagcccttaaatctgattcaattattaattcctgatttacaagtgctatggtgagctaacagaacttatcaatgcctttattgcactttactagccaaatttagaaggttggaattagtctctcctatctagtattctgtcagtttgcccagcttgtacttttaattttgcttctaatggtaatctgccctatcccttgaaataaaataatctacattttgggagggctaattcttcattgtgccaggctgtcccatgcactgcaggggtgagtgtctttaggcttaaatgccaacagaagcccctagtaaatatgacaaccaaaaaagtgcccctacacatttctcagcatcctctggaatgacaggttactgcctctagttgaaagccactggcacaactttggtttttaagctcttatgccatttattttaattgcccagacatcaattccacctaaattcttagtcatagcctggttccttgaatttgctggattagtaaccacagattaaggtgtttcaatagttaagacaggactttggaacaagagtttttaaattgtataatacttgagaggatctatgaatataaattgggtcctgtttataattagttttacataatgaactttaagattgccttttcatggtgaacagaagtttggaaattactgttttggcacaaagcagattatcttagtagaaatacagaattactgcaatctgtgaataagactgcttttaaatatttctacttgtgtgctatcttacatatagaatgtgtacgacagttccaaattttagaataaatccatttctagcatctaacaaaatctgatactgtatcattttaaaacaaagtgtttactttaggcaggattttttaaaataaagcagcaatacccacgcagataagacaaaaaagctaaaatatctcacacctcctaatcctggagtgcaatcttttttcctcatcgtttttgatagggccaaacttgtgtctacagtaaaaaaaaaaaaaaaaagaattactaactggcaaccattaagattctatacttaccatagtcctttaataggcaagctgataaaatagcccccagttattaaaaaaaaaatccaaggaaaacccccaataattagtcttatctccaaattgcatgaagtctcctatatctgaaacttaaaaatgattctaatgacttcctctatcagtaatgtgttatcactgaggtgggtgatggggagggaagagggaagaaatctgtcagtattaccttcgaactcagaaatgtttaaaaaaaagtctcaaacattttgatggttagacaaaacacctccactgttatgtatgggcttcctttttggaaacttatgaacttgctatgtgagcttctgcaaattggttcaaaagcacatttaaggagttgataatttaagactatatgaatcagaattttaacactccattaaaataagagctgaaatttttggcatttatcttcagaacacctaaaaaacagactgcaaattcaactcacattaatactaaatctctttaaaattaactatatcataaaagacaatgactttgtcactaaactaagttttaaaaaaggtggcattctcatgtttcagtcccatgctgccatttgagatgaaaaaaaaggcaactgtcagaattttaattgtgatcagtttggacggctggtacttggtactttctcacaatccaaattagtaaacttgaaaactcaaaccaatttttgcttttagaattaaattcttgttgagtttttcaatcttgtactacaaagccttatggattagattcatttctttctctcacaaggtcatcccaaccgggctccatttcagttgtggcaacccgaaacagggcttggagatgctcatctgttaatggctgactcaaagtgtgttggtttcgagtcaaatatgaaaaagccttttcacagatttggttactatcaaacaaggatgccaccttacaggcaacccctttgataattgggtaggattcagcagacaatccagcataaaactgccccaagtctttgattctgtattcattccaaagattagtgtttgcctgaagttttgttagctccaccctcactgaaataggtgcatattcaggtttaaagttaaatggatttgaaaaaagttctaagtcctttttaatgaacctgaggtccttaaaatgtctctcaaattctttttggagacgacagatcaccatttgatacctatcaggatcaaatattttttcatcttccttattttgctgttttagctcatcaacaacttctctgagggcaggaaagtctgttagatttttttcctcaatatgtctttgaaataaattcagcttaacttcgaaagtacaaatatggtcaaaggcagcagcagcaaagactttactaactcgtaattcttcactgagttctcgaaggtgttccataatgtccaccaagaagccaaagtcacaaagccattgtttgtctgagaagtggactgttgttgcccctactgaaaccaagaacgcttccatttcttttcttagagagaatattagttttaaagttttccctctcctaagccaattgttcagacatcgtccattaaccctttcaccatgctctgattcagattccgttagtaaagtctgaaattcaggtcgcctaacgcctctggtcttaatcaaaactatccattcggatatggtatttatgatctgattaacatctacatcataggagctcaacagttccaagtgaagaaatcctgaataatgaatgacattccaacagttggggcttacggccttttctctcatgtatgagacgagtcctgagttctcaccaatcatcctcaaagtatgggtcgtggtcagtccaaccattctctgcaagctaagccctgctgtctgcagggactctaggattgccgacatgagcgcaccaacactgaaatgatgagtcaggttgattatggtcagaagatcttcttgcacctccaactcagggcctacaccgcggataaagaccaggaggtagttctcataggccacaaaagcctggtcgtccaaggcaagagaataggctttaaagtccctggctcggttaaaaagctggttgcgtagattcctgtcaatgctcaggatcctctgccttgtgatatctggagataagtcaacgccttgcaggacgcttacatgctcgggcagtacctctctcagcaacacctccatgcactggtatacaaagtccccctcaccccagccgcgacccttcaaggccaagaggcggcagagcccgaggcctgcacgagcagctctctcttcaggagtgaaggaggccacgggcaagtcgccctgacgcagacgctccaccagggccgcgcgctcgccgtccgccacataccgctcgtagtattcgtgctcagcctcgtagtggcgcctgacgtcgcgttcgcgggtagctacgatgaggcggcgacagaccaggcacagggccccatcgccctccggaggctccaccaccaaataacgctgggtccactcgggccggaaaactagagcctcgtcgacttccatcttgcttcttttgggcgtcatccacattctgcgggaggccacaagagcagggccaacgttagaaaggccgcaaggggagaggaggagcctgagaagcgccaagcacctcctccgctctgcgccagatcacctcagcagaggcacacaagcccggttccggcatctctgctcctattggctggatatttcgtattccccgagctcctaaaaacgaaccaataggaagagcggacagcgatctctaacgcgcaagcgcatatccttctaggtagcgggcagtagccgcttcagggagggacgaagagacccagcaacccacagagttgagaaatttgactggcattcaagctgtccaatcaatagctgccgctgaagggtggggctggatggcgtaagctacagctgaaggaagaacgtgagcacgaggcactgaggtgattggctgaaggcacttccgttgagcatctagacgtttccttggctcttctggcgccaaaatgtcgttcgtggcaggggttattcggcggctggacgagacagtggtgaaccgcatcgcggcgggggaagttatccagcggccagctaatgctatcaaagagatgattgagaactggtacggagggagtcgagccgggctcacttaagggctacgacttaacgggccgcgtcactcaatggcgcggacacgcctctttgcccgggcagaggcatgtacagcgcatgcccacaacggcggaggccgccgggttccctgacgtgccagtcaggccttctccttttccgcagaccgtgtgtttctttaccgctctcccccgagaccttttaagggttgtttggagtgtaagtggaggaatatacgtagtgttgtcttaatggtaccgttaactaagtaaggaagccacttaatttaaaattatgtatgcagaacatgcgaagttaaaagatgtataaaagcttaagatggggagaaaaaccttttttcagagggtactgtgttactgttttcttgcttttcattcattccagaaatcatctgttcacatccaaaggcacaattcattttgagtttctttcaaaacaaatcgtttgtagttttaggacaggctgatgcactttgggcttgacttctgattaccctattgttaaattagtgacccctcttagtgttttcctgtcctttatttcggaggacgcacttcgaagataccagattttatgggtcatccttggattttgaagcttataactgtgacaaaaaatgtgaagggaagagatttgaaacatgtggaaggaaaagtgagtgcagactataaacttccaaaaagacaagcccaaaatacacctaaacgttatgtcagattattttgttaaaatcagttgttagtgacgtccgtacgttaatagaaaaaagaatgcttcagtttggagtggtaggtttctagagggatttattgtgaaagtataaactattcagggcaatgggactgagagaacagtgggtagaaaggaccactgaaggaaaggaagagaattggaaggtagatgaaagaaggagcaagaacctggggatgttttttccttttcacttgtaatagtagtaacagaagcaatggcagactggcttttgtttctactgtgttagaatgaattgacaggacaactgggcctattattgtactgtgccagaatactgtaaaacaaaactaaacatactagcttggtggcttgtaattaattacttaagtggagatttttattttttttttattttttttttagacggagtctcactttgtcacccaggctggagtgcagtggcgcgatctcagctgactgcaacctcctcctcacaggttcaagggagattctcctgcctcagcctcccgagtagctaggactataggcatgtgccaccacacctggctaattttgtatttttagtagagatgggatttctccatgttggtcaggctggtgtcaaaactctcgatctcaggtgaaccgcctgcctcagccttccaaagtgctgggattacaggcgtgagccaccgcgccctgcagttttttgtatttttaatagagacagggtttcaccatgttagccaggatggtctcgatttcctgacctcaggtgatctgcccgctttggcctcccaaagtgctgggattacaagcatgagccaccgcgcccggctcaagtggagatttttatatggagtccagttatactctttttaatatataagttgagatgactaatacaacttcaatacaggggctcatgagaaatgtctgtaatatttaagtaacttattgtcttctttcttttttttttaagatgaagtcttactctgttgcccaggcggaagtgcagtggcgtgatcttggctcagggcaacctctgcctcctggtttcaagcgatcttcctgcctcagcctcccgagtagctgggagtacaggcgtgcatgaccacacccggctaatttttttatttttagtagagacggggtttctccatgttggccgggctggtcttgaactcctgacctcaggtgatccgcccacctcagcctccccaagtgttgggattacaggtgtgagcccccgtgcccagcctattatcttatttctgaataaagaattgtctgtgtggggaatagataactctttctcatgcagcccctgctagaaaatttgttttctctagcagttggtctgtgcttataggctactctttgaaagcacaaaaaatttattgacttcttttttttgggtttttttttttttttgagacagagttttgcccttgttgcccaggttggagtgcaatggcgcgatctcagctcaccgcaacctccacctcctgggttcaagtgattctcctgccttagcctcctgagtagctgggattacaggcatgcgtcaccatgcctggctaattttgtatttttagtacaaatggggtttctccatgttggtcaggctggtctcaaactcctgacctcaggtgatccacccgccttggcctcccaaagtgctgggattatgggtgtgagccattgcgcctggccagaaaattcattgacttcctaaagatttattaactttctgcattacttttttttttcccctccatcgtaaatataaaagggaatagtagagaaaatcattcagaattttattttttagtgacattatttagtgacattttattagagtcacttaggaacctgaggctgaataaagttcaggtaaaagtaaaattagttgagaagagacatctgccaaaagaaatctatttttaacttcacttgctgtctttcctagaggaacagaaatagtgctgaatgtcctattagaaatgatggttgctctgcccgtctcttccctctctctcacacaatatgtaaactcatacagtgtatgagcctgtaagacaaaggaaaaacacgttaatgaggcactattgtttgtatttggagtttgttatcattgcttggctcatattaaaatatgtacattagagtagttgcagactgataaattattttctgtttgatttgccagt

SEQ ID NO: 33 - DNA, 6521 bp, Homo Sapiens
acaaaattatgcatgggtaaaagatccaatcaggtgcagttcagaaaaacggattttttttttttttttgagacagagtcttgctctgtcacccaagctggagtgcagtggtgcaatctcggctaactgcaaccttcgcctcgcaggttcaagtgattcccctgcctcagcctcccgagtggctgggattacaggcgtgtgccaccaccacacctgactaatttttgtagttttagtagagacgggagggtttcaccatgttggccaggctgctctcaaactcctgacctcaggtgatccacccacctcagcatcccaaagtgctgggattacaggcgtgagccaccatgcccagacccaaatttttcttgttttctttctttttttgggggtggggggcagggtctcactctgttgcccaggctggagtgcagaggcttgatcttggctcactgaaacctctacctcctaggctcaagcaatcctcccacctcagcctctcgagtagctgggaccacaggcgtgcaccatcacacctggctaattttttgtatttttggtaaagacggggttttgccatgttgcccaagctgttcttgaactcctgggctcaagcgatcctcttgcctcaccctcccaacgtgctggaattgcaggcatgagccaccatgcctggaacaaagttttatttttcaagtggatcatttaaaaaaatgctttatggccaggcacgccacttctctccagcctgggcaagtgagccgagattgtgccactgcggtctggtctgagcgacagagggagactccatctcagataaataaataaataaaattaaaacaaatttaaacattctttatatgacaaaattattctcaatggcaattataaaatgaataataagggccaagaaataaactcagtgaatattttctttccttgaactttgtaaatataatcatgtcagcataaaaacagccatgcattgcttaacaacagggatatgttctgagaaatgagtcactaggcaattttgtcattgtgcaaacatcatagagtgtattttcacaaacctagatggtgtagcctattacccatctaggctacatggtatagcctggtgctcctaggccccaatgcttacagcatgttaccatactgaatactgtaggcagttgtaagacaatggtatttgtgcatctactgtagagacagggtctctccgtctgtcgcccaggctggagtgcagtggcataatcatagctccctgcagcctccaactcctgggctcaagtgatcctcccacctcagtctcccaagtagctaggactacacgcttgtgtcatcaggcctgtctactgtttttgtttgttttttggtagagatggagggtctcactatattgctcagactggttttgaactcctggcctcaagcaatcctcctgctgccttggcctccaaagtgctggtattacaggaatgagccaaaagctcaatatggctgttgaataaaagactgactcaatcaagtacggaccctgcccttatggagctgaaggccgttagagcagataaaatgagttatcacccttatatgagttagacggtggacaaagttattattgagggcaggcaaagaactgggttggctcaaagatgccagggatcttttccagactagtggtagagggttggttaaggagtttcctgaaggaggtggcctttcatctgagtttcaaagaacagaagagattagacagggaggacagtaaaatttttttttttttttgaaacagtctcgctttgtcgcccaggctggagtgcagtggcgcgatcttggcttactacaagctttgcctcctgggttcacgccattctcctgcctcagcctcctgagtagctgggactacaggcggccgccaccacgcccggctaattttttttttttttttttttcagtagagacggggtttcactatgttagcgacgatttttgtctgtttgtttgtttttgagacagagtctcactctgtcgatcaggctggagtgcagtggcgcgatctcggctcactgcaacctctgcctcccaggttcaagtgattctcctgcctcagcctcctgagtagctgagattacaggtgcctgccaccatgcccagctaatttttgtatttttagtagagacggggtttcaccatgttggccaggctggtctcgaactcctgacctcaggtgatctgcacacctcggcctcccaaagtgctggtattagaggcatgagccactgcacctggccagtaaaactatttgtgacacagcagcaagtgcacaagcactgacctatcagagttgaaggtggctgaggcactcaagtgggctcctggggactctgttatgccagggaatacctctttagataagggatcaggaggtctggagggtccctaaggaagagctagggtagcaggggtaccctggagctaggggccatggctatatgccaacaggattagaaatatcttaatgtatttaattaacctacacaaccatattggtgggtgcctactgaatattagccctagatatggacctgaaatggccttattctcttttagtttgtttaagccaatggagccttactagaatgtgagctacaaaacagtagagctattctctattcaatgctgcatctgtagggcctagaacagcacctgaaggactggcggaggcttaataaattgttaaaagggcagactagccaggtgtgatggcgtgtgcctgtagtcccagctacttgggaggctgaggcaggaggatcacttgatcccaggatttctgggctgtagtgtagtataccagtcaggtgtctgcactaagttctgcatcaacctggttgcctaaggatggttgaactgacccaggtggaaattggagcaggtcaaaactcaatgctgatcagtaacagggtcgcacctgtaaatagccaccgccctccagcctgggcaacacagtgagatcccatctctaaaataaattttaaaaataattaattagaaaaaaaaaccagcctgtaatcccagcactttgggaggccaaggcgggcagatcacctgaggtcaggagttcaagacaagcctggccaacatggcaaaaccccaatctctaccaaaaatacaaaaattagctgggcgtggtggcaggtgcctgtagtcccagctacccaggaggctgaggcaagagaatcgcttgaacctgggaggtggagattgcagtgggccgagatcgcgccacttcactccagcctgggtagcagagtgcgactctgtctcaaaaaaaaaaaaaaagaaagaaaagaaaagaaaaagaaaagaaaagaaaaaaactgggaggcctaagcccattcttggtgtcctcacactcttctgccccatctccttgcacccagtcttcccctgcaatctgtgctccatactagccctcaagccctcaacgtgacctagtatgagaactggattctgtcactctcctgctcataatattttatgccttccctttgcccagaatatcattctccctattgtttttaccaatggaactggtatttcttcaaggacatgatcaaatttgcctacttctatattatcttctaaagcagaattcatctctcttccctcaatatgatgatattgacagggtttgccctcactcactagattgtgagctgctcagggcaggtagcgttttttgtttttgtttttgtttttcttttttgagacagggtcttgctctgtcacccaggccagagtgcaatggtacagtctcagctcactgcagcctcaaccgcctcggctcaaaccatcatcccatttcagcctcctgagtagctgggactacaggcacatgccattacacctggctaatttttttgtatttctagtagagacagggtttggccatgttgcccgggctggtctcgaactcctggactcaagcaatccacccacctcagcctcccaaaatgagggaccgtgtcttattcatttccatgtccctagtccatagcccagtgctggacctatggtagtactaaataaatatttgttgaatgcaatagtaaatagcatttcagggagcaagaactagattaacaaaggtggtaaaaggtttggagaaaaaaataatagtttaatttggctagagtatgagggagagtagtaggagacaagatggaaaggtctcttgggcaaggttttgaaggaagttggaagtcagaagtacacaatgtgcatatcgtggcaggcagtggggagccaatgaaggcttttgagcaggagagtaatgtgttgaaaaataaatataggttaaacctatcagagcccctctgacacatacacttgcttttcattcaagctcaagtttgtctcccacatacccattacttaactcaccctcgggctcccctagcagcctgccctacctctttacctgcttcctggtggagtcagggatgtatacatgagctgctttccctctcagccagaggacatgggggccccagctcccctgcctttccccttctgtgcctggagctgggaagcaggccagggttagctgaggctggctggcaagcagctgggtggtgccagggagagcctgcatagtgccaggtggtgccttgggttccaagctgagtccatggccccgataaccttctgcctgtgcacacacctgcccctcactccacccccatcctagctttggtatgggggagagggcacagggccagacaaacctgtgagactttggctccatctctgcaaaagggcgctctgtgagtcagcctgctcccctccaggcttgctcctcccccacccagctctcgtttccaatgcacgtacagcccgtacacaccgtgtgctgggacaccccacagtcagccgcatggctcccctgtgccccagcccctggctccctctgttgatcccggcccctgctccaggcctcactgtgcaactgctgctgtcactgctgcttctggtgcctgtccatccccagaggttgccccggatgcaggaggattcccccttgggaggaggctcttctggggaagatgacccactgggcgaggaggatctgcccagtgaagaggattcacccagagaggaggatccacccggagaggaggatctacctggagaggaggatctacctggagaggaggatctacctgaagttaagcctaaatcagaagaagagggctccctgaagttagaggatctacctactgttgaggctcctggagatcctcaagaaccccagaataatgcccacagggacaaagaaggtaagtggtcatcaatctccaaatccaggttccaggaggttcatgactcccctcccataccccagcctaggctctgttcactcagggaaggaggggagactgtactccccacagaagcccttccagaggtcccataccaatatccccatccccactctcggaggtagaaagggacagatgtggagagaaaataaaaagggtgcaaaaggagagaggtgagctggatgagatgggagagaagggggaggctggagaagagaaagggatgagaactgcagatgagagaaaaaatgtgcagacagaggaaaaaaataggtggagaaggagagtcagagagtttgaggggaagagaaaaggaaagcttgggaggtgaagtgggtaccagagacaagcaagaagagctggtagaagtcatctcatcttaggctacaatgaggaaattgagacctaggaagaagggacacagcaggtagagaaacgtggcttcttgactcccaagccaggaatttggggaaaggggttggagaccatacaaggcagagggatgagtggggagaagaaagaagggagaaaggaaagatggtgtactcactcatttgggactcaggactgaagtgcccactcactttttttttttttttttttgagacaaactttcacttttgttgcccaggctggagtgcaatggcgcgatctcggctcactgcaacctccacctcccgggttcaagtgattctcctgcctcagcctctagccaagtagctgcgattacaggcatgcgccaccacgcccggctaatttttgtatttttagtagagacggggtttcgccatgttggtcaggctggtctcgaactcctgatctcaggtgatccaaccaccctggcctcccaaagtgctgggattataggcgtgagccacagcgcctggcctgaagcagccactcacttttacagaccctaagacaatgattgcaagctggtaggattgctgtttggcccacccagctgcggtgttgagtttgggtgcggtctcctgtgctttgcacctggcccgcttaaggcatttgttacccgtaatgctcctgtaaggcatctgcgtttgtgacatcgttttggtcgccaggaagggattggggctctaagcttgagcggttcatccttttcatttatacagg

SEQ ID NO: 34 - DNA, 6565 bp, Homo Sapiens
cgacccttaaatttcataagggttatcgtagttttctgaagtagaaaatgtagcccatttcttgccagctcatgggctacaccttgacctaagcatctttacggtgggtacttgcgcttactttgcagccttcgtcagagattatgctagaagatggcggtatataggctgagcaagaggtggtgaggttgatcggggtttatcgattacagaacaggctcctctagagggatatgaagcaccgccaggtcctttgagttttaagctgtggctcgtagtgttctggcgagcagttttgttaatttaactgttgaggtttagggctaagcatagtggggtatctaatcccagtttgggtcttagctattgtgtgttcagatgcgttaaagccactttcgtagtttattttgtatcaactggagttttttacaactcaggtgaattttagctttattgaggggaattgatctaaaacactctttacgccggtttctattgacttgggttaatcgtgtgaccgcggtggctggcacgaacttgacgaaccctagggttagtatagcttagttaaactttcgtttattgctaaaggtttatcactgctgtctcccgtgggggtgtggctaggctaagcgttttgagctgcgttgctgcgtgcttgatacttgttccttttgatcgtggtgatttagagggtgactcaccggggcagggatgcttgcatgtgtaatcttactaagagctaataggctacgaccaaacctatttgtttatggggtggtatgagcctgtcgaaacattttcagtgtattgctttgaggaagtaagctacataaaccgtatggggtgtctttggggtttggttggttcggggtatggggctagcagcggtgtatatgttgagtaaggtgggcagggagttgcattgatggggttagtagaatgtgagttgagggaggatgatgtgttagttgaggggtgactgttaaaaatgcactttccttcctgccaccatgtgaagaaggatgcgtttgcttccccttccaccatgattttaaatttcctgtggcctccccagccatgaggaactgtgagtcaattaaacctctttcctgtacaaattgcccagtcttgggcagttctttataagaacatgagaatggattaacacaggtccaattctggccacccctcaacctcccaagccattggagttgacttcctgggcagtcttaatatgattacccctcccactctccagtcaccagggcatatcaggcttcatgaactactgactccaacccctgggttggaggacaggaaaattcttagcagaggctaactggagatacccgcttctctccaggatctctagaaccatttcaatactttgaaatgttttaccttcagacactgggtaatgaatgttaagtacaaaatattattgggtattgtggttaactaggaataacagagtagaagattatgacccatttcagcccatcctaaaattcacattttattgcatttagggttgggtccagaaaggggatcatcacttaattttagcaagtcccaaaaaatagttgttttgactttatgtgaaactacaggttattgattacactgtataatttatatttgggcctactgaatgatggttcaagataacttgcaaatctgataccacagtgagctatttaatgtttaatgtaacttttcaaggtgatgaaatcaattactcaggtagtagaataagttattgtcatgtagtataaataactgcttattaattttctataatcacctttgtgatattaagcagcttcatcaatagctccttttatacaatttcattttatcatatactgatctccactatgagacatgattttcttgtggtgaatttatgttaaggtacttacttgagttctctgctgagaactaaattaattctaccctttaaaggtcgattcttctcaggaatggagaacccaggtcttcttacccataatcaccagattctgttacctataaaatcacaaagaaagcctaagtatattttgggaatatacatatattttcatgtattatatacaacatgtccttgaataacatcgttttcttctaacgttgatgagaaaaataatcaattcctggccagggccaccgtctgtgtggagtctgcatgcttttcccatgtctgcatggggtttctccaggtattccagtttccttccacatcccaaagacatgcacattattcttcttaaatgtatgtatagctcatatttacttcagtgttttctattagaagtgtttttggccttcatttagaagtttggtgatgtttttgtgaccagcaatatgccctaggaacttaactcttgtgtacatccagtagcctatggtaaaattggttttgctctacattgtttcacttaaagtcacagtttccaagaactcacagatgacattgaggactatctatgtgcatagatatgatggacatcctgacatttagtggatctcctttaaaaaactgaacttaaaagtcttaccaaaattcatacttatcactcattacctaaatctaactatttttccctttggcattatccaatttatatccaatatttagttttaatcatttgcaattgtgtatgacatagtaaagattctggggaggccaagatgggcagatcacgaggtcaggagatcgagaccatcctggctaacacggtgaaaccccatctctactaaaaatacaaaaaattagccaggtgtggtggcaggcgtctgtagtcccagctactcaggaggctgaggcagaagaatggtgtgaacccgggaggcggagcttgcagtgagcgtagatcgcaccactgcactccagcctgggcgacagagcaagactccctcttaaaaaaaaaaaaaaaaaaagattctgagtcaaagtgctcaagttgaatgcattttgtcatccacaagacaaatcgtgttaaccccttgtggtttactttatctataaaatagagataacaatagttcctgcttctagggttgttgtgggaattaaagacttagaataatgttcagcctctaatcagtgctgtcacaactgtctgatacaattgtattatatttgtgtactttgtagattgatattaaatcatacttttaaaaataggtgcttaatgttccactcaattaccttaaaacatgtttaattatgtctctatcctactcttataacacttctataaaaactttttacatatagcgtccacttttggttcagtttcttaggaaaataactttgagagtcagctatctgaaccaaagaaacattaacattaccagactatattgggatttttgagactggcttttatcaattctttagctacgggctcttgtcatcatctctaccagtgacctaagtgtcaaacccaaatgccttgtatctgtcccattaaagagatgcagcatctgctcctttcttactgtttccatttcctctgccatgcctcctcttacaaccataaatatccaggtctcttaggttttaaacggggcatctctcaacccccacattcttttccttggttattcccttccctccaacagttcaattcacctagatccccacgcctgaaattatcctagatgtcctagaggcgcctcatcattacaatggtacattattctccactcctttacatgtcacgccagctttcaaactgaaaatctgagcgttcatccctggtgcatcacctttaaattccagatctccaaaatccagggtcatgtaaccttaaaaaatttttaccctctcttctccactgcccttgttcaggccttatctcttccagcagctgttccaaaggcctactctgttttcctttcggagtgctaacctccaccgaagcctccacccagttgccaattctgccccatgcctgataatttgctcgtgcgttgacatacataaaatttctaagacaaaaattttttaataatggtaaatgaaccttgggaactgcatacagatcatacagatccataataagagaaaaggtcccagattaacacggaaaactttccatttaactaacatttgcactggtaaacttcatcaagcaagaccctacttaatcccacattaccttctactgaagaggttgtggtcattctctggaaatatctgaattcattcctacaagttagagaaacagcgttactcgaaacattatcccttgggctcgagctctaaggcacctgacaaacggagcgctgtgggtaggggtgaggtgttttctccagggctgggactttgccctgggcgagggcgccgcagggcaaagacctcaccgggcagcagaatccgggcagaaatcagcaactgggcctcccgcgcagcagaaaaggggaatccagtcggggcccacccttcctgccagcgcagaccgcaagtctggccccatcctctcgccgggagtcggcctggcgcgtcccgcccaggtaccccgaccgtgggcagcctgcgcccgtttgggtcccatcgccccggcccggcagatacctgagcggtggccagggcaggtccccgttcttgccgatgcccatgttctgggacacagcgacgatgcagtttagcgaaccaaccatgacagcagcgggaggacctccgagcccgctcgttacagcagaacgcgcggtcaagtttggcgcgaaattgtggccgccccgccccctcgtccctatttgtgcaggcgaggccccgcccccccgccccggcgcacgcagggtcgcggcgtgctcgcgcccgcagacgcctgggaactgcggccgcgggttcgcgctcctcgccgggccctgccgccgggctgccatccttgccctgccatgtctcgccggaagcctgcgtcgggcggcctcgctgcctccagctcagcccctgcgaggcaagcggttttgagccgattcttccagtctacgggaagcctgaaatccacctcctcctccacaggtgcagccgaccaggtggaccctggcgctgcagcggccgcagcgcccccagcgcccgccttcccgccccagctgccgccgcacgtagtaggttctgtctgggactgggcagggccatcggggctgggggggcggggcttgtgggtaaggcgggcggaggcgtggaccctccgcccgatgatagggctggaggaggaaggggcgggctgaagaaggggaaggtgggaagagcccagccggggctacaaattgggtgaagcgctgaggttttagtacttccgtttgaggagataggcaaaggttatgcaggtttttaatggcaggcctgagacaggaactcaggtctcctgactcccattctgatgagggggcttgtgggcaaggggtgcgtcttttaacctccatcctttttttttttccttggtggtcgaagagttttactgattttttaaaaaagtgctggattgggtgactagaagaaagctgcccttaggtctccagtttttaagactgcaacagcatggctcaatatttgaaatcactacggttaaaagcagtcatattgtgcagttccccagtgaacactttttgtagtttagattataaagtctgaaatacagtttgggtggataaagtttcttaggatggtatagatgtgactaatcatggagtccttcctgttgccgtccttcaacgcaataagtacgtttgtttgtttttaaaccagagatactgccacaggaaaagcccaagggtgacccctcacttgggtcacctgcacagtatttttcagactgaggctgtggaagggcattgaagactggtgtttagccacctaccgtgttttaatgtaggtggcagcttgggtgcttcaaaatcttgttcctttcgtatatatttctcccttaaaatgattactcctcttctgttttttttgaggacgagctacgttttcatgaattcaccaaaattttgcacccaccatttaaagggtagctggtgaaggacttatgtatgcttttggcaagttttctgccaagaaaaaattcataatcttgtcacatctttagtgatgaacataaaccttttaaacaggaaacacttaaattgcaatgaacatgtcaaaaatgatactgttcttttattacctatcttttcccctctgtgcctttgctacataactgtttatttcttagaggtattttatttagcatatgtaagtagggtgattcaagttttataattagagaaagctgaaggctcattgaatcaagaccggtagcagccttggtttcaattaattctaaacacggcttgagttgctgaggctcctgactatcagactctaccttgtcttttatggtgttaaaaacagttcacccatagggttttccagagctaaaagtagaggattctttgaagagtggatggcaaggaaccttgtcattcagttgtaaagtttaaattggttcacatacgtcaggccttctcagagtagagataacacatcattttctaaccttcccgatatagg

SEQ ID NO: 35 - DNA, 2891 bp, Homo Sapiens
  unsure (223, 366): unknown base
cccctttcccccgaattgttttctcttttggaggtggtggagggagagaaaagtttacttaaaatgcctttgggtgagggaccaaggatgagaagaatgttttttgtttttcatgccgtggaataacacaaaataaaaaatcccgagggaatatacattatatattaaatatagatcatttcagggagcaaacaaatcatgtgtggggctgggcaactagctnaagtcgaagcgtaaataaaatgtgaatacacgtttgcgggttacatacagtgcactttcactagtattcagaaaaaattgtgagtcagtgaactaggaaattaatgcctggaaggcagccaaattttaattagctcaagactnccccccccccccaaaaaaaggcacggaagtaatactcctctcctcttctttgatcagaatcgatgcattttttgtgcatgaccgcatttccaataataaaaggggaaagaggacctggaaaggaattaaacgtccggtttgtccggggaggaaagagttaacggtttttttcacaagggtctctgctgactcccccggctcggtccacaagctctccacttgccccttttaggaagtccggtcccgcggttcgggtaccccctgcccctcccatattctcccgtctagcacctttgatttctcccaaacccggcagcccgagactgttgcaaaccggcgccacagggcgcaaaggggatttgtctcttctgaaacctggctgagaaattgggaactccgtgtgggaggcgtgggggtgggacggtggggtacagactggcagagagcaggcaacctccctctcgccctagcccagctctggaacaggcagacacatctcagggctaaacagacgcctcccgcacggggccccacggaagcctgagcaggcggggcaggagggccggtatctgctgctttggcagcaaattgggggactcagtctgggtggaaggtatccaatccagatagctgtgcatacataatgcataatacatgactccccccaacaaatgcaatgggagtttattcataacgcgctctccaagtatacgtggcaatgcgttgctgggttattttaatcattctaggcatcgttttcctccttatgcctctatcattcctccctatctacactaacatcccacgctctgaacgcgcgcccattaatacccttctttcctccactctccctgggactcttgatcaaagcgcggccctttccccagccttagcgaggcgccctgcagcctggtacgcgcgtggcgtggcggtgggcgcgcagtgcgttctcggtgtggagggcagctgttccgcctgcgatgatttatactcacaggacaaggatgcggtttgtcaaacagtactgctacggaggagcagcagagaaagggagagggtttgagagggagcaaaagaaaatggtaggcgcgcgtagttaattcatgcggctctcttactctgtttacatcctagagctagagtgctcggctgcccggctgagtctcctccccaccttccccaccctccccaccctccccataagcgcccctcccgggttcccaaagcagagggcgtgggggaaaagaaaaaagatcctctctcgctaatctccgcccaccggccctttataatgcgagggtctggacggctgaggacccccgagctgtgctgctcgcggccgccaccgccgggccccggccgtccctggctcccctcctgcctcgagaagggcagggcttctcagaggcttggcgggaaaaagaacggagggagggatcgcgctgagtataaaagccggttttcggggctttatctaactcgctgtagtaattccagcgagaggcagagggagcgagcgggcggccggctagggtggaagagccgggcgagcagagctgcgctgtgggcgtcctgggaagggagatccggagcgaatagggggcttcgcctctggcccagccctcccgctgatcccccaaccagcggtccgcaacccttgtcgcatccacgaaactttgtccatagcagcgggcggacactttgcactggaacttacaacacccgagcaaagacgcgactctcccgacgcggggaggctattctgcccatttggggacacttccccgccgctgccaggacccgcttctctgaaaggctctccttgcagctgcttagacgctggatttttttcgggtggaaaaccaggtaagcaccgaagtccacttgccttttaatttatttttttatcactttaatgctgagatgagtcgaatgcctaaatagggtgtcttttctcccattcctgcgctattgacacttttctcagagtagttatggtaattggggctggggtggggggtaatccagaactggatcggggtaaagtgacttgtcaagatggcagaggagaaggcagagggaaaacgggaatggtttttaagactaccctttcgagatttctgccttatgaatatattcacgctgactcccggccggtcggacattcctgctttattgtgttaattgctctctgcgttttggggggctgggggttgctttgcggtgggcagaaagccccttgcatcctgagctccttggagtagggaccgcatatcgcctgtgtgagccagatcgctccgcagccgctgacttgtccccgtctccgggagggcatttaaatttcggctcaccgcatttctgacagccggagacggacactgcggcgcgtcccgcccgcctgtccccgcggcgattgcaacccgccctgatccttttaagaagttggcatttggctttttaaaaaacaataatacaatttaaaacctgggtctctagaggtgttaggacgtggtgttgggtaggcg

SEQ ID NO: 36 - DNA, 1092 bp, Homo Sapiens
aagcttccccttcatcatccaagaaggcattcaggtctttctgtgctaggccccaggtaaagtgctggactacccagtaattgggttcagtagcaggatggcctcagattgaggtcccagggccaaaggaccactcctctcctcagcgctggtccgggaaaggcaagctccgggcgggagcgcacgccgcgcccccgaagcctggctccctcgccacgcccacttcctgcccccatcccgcgcctttccaggtcttctcccggtgaaccggatgctctgtcagtctcctactctgcgtcctcggccgcggcccgggtccctcgcaaagccgctgccatcccggagggcccagccagcgggctcccggaggctggccgggcaggcgtggtgcgcggtaggagctgggcgcgcacggctaccgcgcgtggaggagacactgccctgccgcgatgggggcccggggcgctccttcacgccgtaggcaagcggggcggcggctgcggtacctgcccaccgggagctttcccttccttctcctgctgctgctgctctgcatccagctcgggggaggacagaagaaaaaggaggtagaatggatccccttggccttcccctgtggtcgggggcgggccagggtgggccgcgttgcccaggcagccctgccgtgttgctaggcagcctggtcgccggcgtgggcgatgccggcgctggggcgggagccgcgagggtgggaggccctggggcgtttccgggacgtggagttagcagggttctgacttgaaaaacgacggcaaagcgtgttcttgactgcttctgagcacctcacacctttcagacccagggcgcctttattcccagctggaagcccagcttagagcaatggtgccactaaaaggggtgtgttggatgtgaaaataccctttggaagtatttataagcctgcaggaaatatgttttccttattttcttactctgctcccttcattacccatttcaagaagcaacagaacctgtgcagagtgtgttttaagttacactgtatgtttatttttgtttatgttgaactcggtgtatacttgtgagaataagctt

SEQ ID NO: 37 - DNA, 5203 bp, Homo Sapiens
agggaacccaacgcccctccggggcagaagggggcagcgcgcgcgaggcggaaggacagtcactctcgctgcacaaactttcccgcgggccgcgccgcgcgtgcaggggctggacgccacccggcgccagagccgggcctgaggagcggggtctggccgggaacgagggctgccagcctgggtggtgtcatttgttgcttcatttttcattccctttcctctcgtgaggaatcagaggcatcgggccgcgcgggctgagaattcttaaattctccccggccgcattcggctgagccaacccgcagttcctgtcagcccctctgtcccccgggcagcggttttccccgctagccaggtttggaagtcaccctctgtgagactgggttaggaagtgacgaaaagcgccgaattgttttcaaattgaaaatacttttttttttttttttggagatagcgctgacaaatatatgggatcccggcttttgatccctggctgccgcctctgttctcctgtcgctaataaaactcgcattgagccccttagtgccttgattaacaggcagattaactcttactggggttgggaacagcttgtcctaatcaatgtcattttaaaagcccgtcaggatgcgcttagcttcggttccctggatgcttgagcgagccagccatgacatttgctccctccccctccccagcctcaaatcccccagtaaagcccccagttcccgcctgcctgttcccaggtctacaacgggacaaatcgcaggaccgggtcgttggcctttagaataggcagcggtttagagaggggatatccagggagaagggactgaggtggccttgacttgcttgcttttcctttgaagctgaactcttgcctcttgggggcagaggttacagggaaaagagagatggggggatcgtcacagggtgatgaaatggaaagcaaacttttctaggaaccctatttgcaaaaatcggagagtgccgctgatttcagttgtcctacatgtcaggagttttaaacctaactcctatctggacaacagcatggagggactgggaggcaaagccttgggagtctgacccgctgggctgctaggaatccctttgctgggagactccactggacaatgttattttaaaggtattttgggggtgggcagggagaagacagagagagaaagagagagagagagagagagagagagagagagagagagacaggctggcctcccagagcgaacggaagaggactgaggactgaacccagggagcccctagcactggccatttggcaggaggcgaggaagggcgagggcaccgcggcttccccccaagccgagcagtggccacagcctgaaggtgccacggggcggctctgggatcttcttggcttttctaggctctgggctcggcgaggctgccgggttagcgggaaccggcaggttgctggagaaaggagagggacaaaggcctggaagtgggggaggcaccagggactgggcggccgggatgggagcctttgcctttagggctcactggacccgtttgccagctccgcggacaagggatcccaccttcccagggtctgcaaaaagagagacgtttggggcactacaaagtgacgcaggtgtctgccaagactttccttctccaaaaaatgccagtcttcaccctttccagcgcgccggcgctgcgcctctgcttgaccggggaaagagagagtttggaggtgtcagaactgtcagaactccggatgggaggctcttggttctgaagctgggagctggaggcacttccccccagaagtgggcacttctttgcctccccgaaggcctgatggggtgggcacaggggaatgccagggatcggtgcgggtgagatgcttgcctcacctcatgttgacgcatcaatactggctagaagctctgggcaggctctggcgagccacggtcccccagcgggactccctccacgcagacagccccgctaccgggtgggacgaccccggcggcccccgcgggaacgcacccgccggcctgagaggtcctccctctggccacagggggcggagggtaggggggaacaggggcctgtggggaggcggggaaaggagacagaacctaaagcgcaatccccgccgcccccccgcgtcttggagggcagcaagtgggcctcgggcgtgttggtagccgcaattaaaatggcgacctgcgagttgtctcggttttgtacacacctctggcaaccgcgcccgcacctcagtctcggcccccacacccctaggccgcttcgcccccagagccggtacttggcagagggagtgaggctccccacgaggtagaacagcacccccaccttccttgagaccagtccagagagaacgaggaaatctcactctcacccctctctccttaaactttgaaaactcggcctcattctggggttgaactcccctccccaaatattgacacatgggaagcagccaagtcctttttgttttttgtttgtgcggaggagtttccaggagtctttcccggagcccccttccccacccaatgacgtcagtggcattcactcctcgctccttgccttttctgattttttgttaaaacttttctccgcagcgagatgggggttggaggggtgggagaaggagctgattcaaagagccagtgccctggggggaaatagcaacaagattacggctgcttctttccgaggcaaagcttaagaaggtgctaatccactcggtcgctaattgagaggttgtaaaaatgatactcgcctccagttcggacagaatcacttcccccccccccgcccccccgcaagtccctcgctcatgcacagcggacttgagtcttgagtccaagcttctttaatgctcgcttggaaagtaaaaggagagagaaagagaaagccgactttcgctggtctgggactcagggccgcggccccacttgccggcatcctccgaaagtcgcgctcctgcgaaatgaaacctcgcccaggaggccgcggacctggacacccggcgccacctccttcacctctgacccaggtttcctcccggcgctgcgagctcccggggaagggttagagccggcagccctccccagcccggggaggggagagggttatgcgaccccacctctggctagggccggggaggcctttgcttcccgggagccctgcccgggctccttggtcgcagggctgctgggtcccaggcaggaacgagagggtgaggcccacatgtggcccggcggcccagggcggcttgcagcgtcctcactgtcccggctgccaggggctgcggcgacgcggccagtcagcagcgagttcaggtcgcgcagattttattgatgagctctgactttcagcactttccctaagtcaagaagagtctagcgtacccttcggctgcttcatttcagcctccctgcctcagctcttcagccctattccccctcgccctgtcctggggtgtgtacagcagcccaggccttccttctccttcccggctccgtggcccgaagccgccgagagagctcgggacagcgcaggaccaggcagccgctcgctctcctgtcaccttaactgcaggctccgaggggcgcctttggagtgtactgaggtgtgtcctaatcgtgcggcattcaacaaatggacttctggtgtgtggtcagaagagaaaagccatttacttactttcctccccggttttctggcaacagctgaaggggagctgcctccgtggactgagcagacccaggagagggagtcgtggtgcggagacacacgcaccacacacagatgaccggtggcacacacgacacacgctgacataccgacatcgccagtgggacacacacacacacacacacacacacacacacacacacagagagagagagagaatccctcccagcattggtcatccgcccccccacccaggcttccactccccctcccctcttatctcccctggcttcccctcctctcgggcgctgcgaaaagcagccgcacttagtcaacaaatggcacgtgggagaagttggtgagtgtttggtgaggactcttcagggcttttcacaagaaccctctgtacacaaagtaagtggcgtgtttactcgggcctctccagccagagctgtgcctctgctccgctgcgcaccgcggcttccgaaaggagaaaggagagaagaaagggcggggagagcggggtggaggatttggacaggccctggaggcttgggctggggaggcctctggcctcgtttagttctcggcccggcaacctcctctcggcctaggcttcgccgcggcctccgcagctggaatggagctgccaggacccagtgacgctcccgcccctttcctcttcttccaaggggccaggtgggctggggtgcggccgccgctgtgctctgtgtcttggggccccggctgggatggggtgggggcgggcgggggcggggcggcaggccacgctgtcctggagttggcaagaaaggacagcacagaaacttgcaccctccgaggactgggagtcccgagtccagcttagggggagtgggggcgcgacccccaacccagaaaccttcacttgaccgctcaagttcgcggcagcagggcgggccgcgccgaatctcggcgtgcgcggagcggggagatgcaggcgagcgccagagcccgggctcgggggccctgcgccggggagaggagccgggacccaccggcggagccgaaaacaagtgtattcatattcaaacaaacggaccaattgcaccaggcggggagagggagcatccaatcggctggcgcgaggccccggcgctgctttgcataaagcaatattttgtgtgagagcgagcggtgcatttgcatgttgcggagtgattagtgggtttgaaaagggaaccgtggctcggcctcatttcccgctctggttcaggcgcaggaggaagtgttttgctggaggatgatgacagaggtcaggcttcgctaatgggccagtgaggagcggtggaggcgaggccgggcgccggcacacacacattaacacacttgagccatcaccaatcagcataggtgtgctggctgcagccacttccctcacccacactctttatctctcactctccagccgctgacagcccattttattgtcaatctctgtctccttcccagg

SEQ ID NO: 38 - DNA, 8085 bp, Homo Sapiens
  unsure (2545): unknown base
gctccatgacctaatcactccccaacacctcctcctactaagactatcacattggtgattgggttttgacacacagatttggggagaacacaaacactcatatcacagcacctactaatttatccagccatttcactgctaggtatttacccagaaaaaatgaaaacacatgttcatacaaagacttgtacaacattttcatagtagctctatttataataccaaaaaaattggaaacaactcagatatttatccacagttaaatggataaacaaactatagtatataaataaaaagaataaaaagaattaactattgatacatactataatttagctgaatctcaaaataattatgctgagtgagagaaaccaaatgaaaaaaagatacactatattatatacaattctaagaaataaaacctaatttatttggcacccagatcttcatttctataccagtttcaaataaaaagtctcaaacttccttggataaatggctgattctacgactggggcaggaaatatacaagatgagtctgatgagtctgtagcatcttgtaataccagaaagtaggaaagtccacacatacacacacatacacacaatacagagagtgggtcaaggagcacaagagtcaactgaaaaagcccccagtgccaaaaactggaaaaatttgagcaacaaagtattcatgaatccatacaaagaaaagactgaataaagaagtaaatgggggagaagaagcaaatcttcctcacagaattccaaataaattatgtagatactccactccaaaggagggctagcataactccctactcccccacacttccttaagtgactcataatgatttccttccaaagagtacagagtatgcaaagagggaaaaaagagtaactatgcaatggagaaacctgacaaacactacttcagccaggtgatggagaacaacattaacagtcataagtcatgttgacaatatgtacccttcatatgatgtaataaatacagtacattacctctttgatttccaccccgccaaaacccaaaaccctagtctactcatgaggatacatcaaatcccaatagaagggcatcttgcaatatacctcaccagtactcctaaggactgtcaaggtcatcaaatacaaggaaaatctgagaaactctcacagccaagaggagcacaagacatcataacaattaaatgtggtgtcctggatggaatcctggaaaggaaaaaggacattaagtgaaaatgaagaaaatctaaataaactatgaatattagttaataacaatttatcagtattagttcattaattgtaacaaatgtaccctattaatttaaaatgctaacagagaaaattgtacaaatgatatatgagcattctctatattatctgctcaatttttctgtaaatccaaaatcgtttcccaaaagtaaaatctattaataaaacatctaaagcaaacagacctaaaaggcatatgcaaatgtataatttaatgtttaataaatcagatataaatatttttaaaaacctaatatttggtgacagaaagcagattagtggcttgccagaaagtggtgattagtactaggggaaggggatgggacagaacagtatgaagggatttaaaaaatggcatgaggaaacttttggaggcaaagggtatgtttatcattttagtttcacaggtctaacaacaaattatacaatttaaatatatgcagcttattatatgacaactatatcttgataaagtggtttttttccccaaactatagaaaaaatacttccacatttaaatcctcttctccaaaaacagtcttcaggaatatttgaagttagccccatcacacctgaatttaatcagtgaattttgttcattcaaagattcatacatttgggaagttcctgtgccaaaaatgctaatcacccagcatcaaaatttatggaataatggtgatttaggacatgctggacatctttattgttgttttcccacttcaagattttcaatcttttggaaacaacctccccagacattctgacaagggaattattataaccaaccaaaatcaagccaaatatagtttgtcagatttaaaatgaggccaagtgccaattttacagcagcgaccggaaaatcaaattatatggcatctgacatttaaaatcacactcctaagaaggctgtcatttgatgtcttgggtttgggttacagtacttaactttataatactgggtaaccttgtgcctcagttttcccaactatgaaattgggataacagtacctattttgtgagactgttgaaggattacagttaacacaggtaaaaggcttacaagactacctggcaatgctgtcctgattttacaaattctatacactgtgtggcattagccatcaggaaaatataaataaatcagtgagataccacttcacacacttggggggctataacaaaaaagacagataaaaaatgttgtcaaagatgtgaagaaactaggacccttattcactgctggtgnaaatgtaagaagtacaatcatttgaaccatagtctggcagttactccaaagaccacacctagagttgccatatgaaccagcaattccactcctatgcatatatccaggagaaaggaaaatatacgctgcacaaaaacttgtacatgaatgttcattagcaggatttttcatggtagccaaaaggtgtaaacaacccaaatgtccaacaactgatagagatggataaataaaatgtggtttatccatacaatgaaatattatttgtcaataaaaaggagtgaaggagtgaagtactgattcatgtggaacatggatgaaccttgatccaaaatagccaaatcacaggtacaaaaagcatattagtggctgctgggagatttaggcggaaatgtggaataactgctagtgggtattgagattttagagtcatactcatgttacaaaattaatagtgctgatggttgcacaactctgagtacatgaaaaatcaatgaactgatactttgagtgagctgtatgatactggaattacacctcaataaagcatggtaactgttttaagataggctggaaagagaaagcctgaaaacaacaataatgatattaataaattagtttacttctctagtctcatatacttctgtgcccacacttgctcctgttctattcataatggtccccttgcagttgccatattatatcctgccatttgatgcccggtgaacattctatacctgcttcccagaattctctttacctttcctctatctgcctaacttccacatatctaaaattaatcagagtaaactatttactagaacaaccaactccaaatcctagtaacctaacatgataaaggtttgtttctcactcatatagcccctccccagatgatcgaggggtccaggctccttacctctagtggctcccccaccttctggagtcttctgcattctttatacatggttgagataaactatgagtcattagcacagctagaccttgaggtcctacaagaaaatttgcaaatcattcactctgttttgaacaaggtatatttaagatgatgttaaaatacccaatggtcttgggtcaaatacagtttatgactgtgtatctaaaatatatattgcaatattcttccctttttctactgacttcatgaatttagcggggatccattttataagctcaaagataattacttttcagactaagaatatttagggtaaaaagtactgttcaacatctctactgaggatgttatgatgtagcacactgtataagctggagctaaaggaaactttccttaaagtgctatttactaaaaattggaacacattccttaagacaaatcgaagtgtggcacacaacatccaaacttccatcatagatacagaggtgttaccatctcccactcccaaatttctttgtcacgctgaggatactcaagaggagcaggacatgttggtcgcagcaggagaaacttgaaagcattcacttttatggaactcataagggagagaatttcttattttagtatcgtccttgatacatttattattttaaaagataatgtagccaaatgtcttcctctgtgttaaatctttacaaaactgaaatcttaaaatggtgacaaaaattctacttctgatagaatctattcatttttccaattagatagggcataattcttaatttgcaaaacaaaacgtaatatgcttatgaggttccatcccaaagaacctgctattgagagtagcattcagaataacgggtggaaatgccaactccagagtttcagatcctaccggtaattggggtagggaggggctttgggcggggcctccctagaggaggaggcgttgttagaaagctgtctggccagtccacagctgtcactaatcggggtaagccttgttgtatttgtgcgtgtgggtggcattctcaatgagaactagcttcacttgtcatttgagtgaaatctacaacccgaggcggctagtgctcccgcactactgggatctgagatcttcggagatgactgtcgcccgcagtacggagccagcagaagtccgacccttcctgggaatgggctgtaccgagaggtccgactagccccagggttttagtgagggggcagtggaactcagcgagggactgagagcttcacagcatgcacgagtttgatgccagagaaaaagtcgggagataaaggagccgcgtgtcactaaattgccgtcgcagccgcagccactcaagtgccggacttgtgagtactctgcgtctccagtcctcggacagaagttggagaactctcttggagaactccccgagttaggagacgagatctcctaacaattactactttttcttgcgctccccacttgccgctcgctgggacaaacgacagccacagttcccctgacgacaggatggaggccaagggcaggagctgaccagcgccgccctcccccgcccccgacccaggaggtggagatccctccggtccagccacattcaacacccactttctcctccctctgcccctatattcccgaaaccccctcctccttcccttttccctcctccctggagacgggggaggagaaaaggggagtccagtcgtcatgactgagctgaaggcaaagggtccccgggctccccacgtggcgggcggcccgccctcccccgaggtcggatccccactgctgtgtcgcccagccgcaggtccgttcccggggagccagacctcggacaccttgcctgaagtttcggccatacctatctccctggacgggctactcttccctcggccctgccagggacaggacccctccgacgaaaagacgcaggaccagcagtcgctgtcggacgtggagggcgcatattccagagctgaagctacaaggggtgctggaggcagcagttctagtcccccagaaaaggacagcggactgctggacagtgtcttggacactctgttggcgccctcaggtcccgggcagagccaacccagccctcccgcctgcgaggtcaccagctcttggtgcctgtttggccccgaacttcccgaagatccaccggctgcccccgccacccagcgggtgttgtccccgctcatgagccggtccgggtgcaaggttggagacagctccgggacggcagctgcccataaagtgctgccccggggcctgtcaccagcccggcagctgctgctcccggcctctgagagccctcactggtccggggccccagtgaagccgtctccgcaggccgctgcggtggaggttgaggaggaggatggctctgagtccgaggagtctgcgggtccgcttctgaagggcaaacctcgggctctgggtggcgcggcggctggaggaggagccgcggctgtcccgccggggcggcagcaggaggcgtcgccctggtccccaaggaagattcccgcttctcagcgcccagggtcgccctggtggagcaggacgcgccgatcgtccgggacgtccccgctggccaccacggtgatggatttcatccacgtgcctatcctgcctctcaatcacgccttattggcagcccgcactcggcagctgctggaagacgaaagttacgacggcggggccggggctgccagcgcctttgccccgccgcggagttcaccctgtgcctcgtccaccccggtcgctgtaggcgacttccccgactgcgcgtacccgcccgacgccgagcccaaggacgacgcgtaccctctctatagcgacttccagccgcccgctctaaagataaaggaggaggaggaaggcgcggaggcctccgcgcgctccccgcgttcctaccttgtggccggtgccaaccccgcagccttcccggatttcccgttggggccaccgcccccgctgccgccgcgagcgaccccatccagacccggggaagcggcggtgacggccgcacccgccagtgcctcagtctcgtctgcgtcctcctcggggtcgaccctggagtgcatcctgtacaaagcggagggcgcgccgccccagcagggcccgttcgcgccgccgccctgcaaggcgccgggcgcgagcggctgcctgctcccgcgggacggcctgccctccacctccgcctctgccgccgccgccggggcggcccccgcgctctaccctgcactcggcctcaacgggctcccgcagctcggctaccaggccgccgtgctcaaggagggcctgccgcaggtctacccgccctatctcaactacctgaggtgagggcccgggacggggcacgcccagcgcgtccgggagtagcggttccgttggcggcggcggccgccaaccctcagccccagccccagcgcaccgctgcgctccccggggcggccggagagggtgggcagcgggacacagcacaggggcagttgcctcccttcttcttccctcctctcctcactcttggggacacgaaggtgggcgcagaatatactatttttggggcgtgcctccctgaaagctgtttttttgtttgttttttaactttccgaatcttccagattccgaagcagaaccaaccccgatttaaaacgtgcagcgtcacactaggtccgctgtagcccagtggggcagaaagtgcgcggcgagttgggggctttatgaaatgcttctttcttagaagaaggacgtttaccaggagtgcttgtcttggagaggagttaaggcaccgttcccccgggaggggtgggacttgagaggtggccggccagaaccgaaagcagcaccatcttagggatttgaacacttcagtggctcagttttcttaagaatctcaagattaaaattaagttcacgtgggaaatgtttaaactgtggatttaaacgcctgtcactgcattgcaccgttttcttattattgcttgctattcactacaattttttttatatacaggtttaaaaaacactactttgcatactgaagtaatggaatgtaaaaaaagaatgctctgtttggaatcttatgttgtgaataggcaaaacagtgtcagtgtattggacaatactttaaaatgacaaacatatacttgcttaagtaagcaatgattacagggttgtgttttaaaaactcaaaaccaaaacattgcaaagtaccatcgaacttttaaagccaaaccatatttgttttgacccagcatacagacaggaaggacataacatttcatttgtcaaagactaaattgtttctatataaagagttttgtagaaagatttccttttaaccgactttaactttctaggacataatattatacactaattattgttcttttatattggtgctactgatgaatggctaatcatttgcaagtatggtgaatccagttacggatagtctattaccaagtttagtttgcatgtctttcaagtgtatatatacagttctgtttttaaaatctcctttcaccctgttaatactggtttaagaaacctttagtattagatagtggtgcacttaaaaataaatggagtactttgttttgcatttcaagg

SEQ ID NO: 39 - DNA, 7110 bp, Homo Sapiens
tgttttttgtgatgccttagaggccagaaggatgttttgaaggggaaaattgtaggagttaggcagagcagggttttggctccttctcaatgtccctctacctagacaaattcgggctattctgcagaggttgcagtgagccatgatcacgtcactgcactccagcctgaggaacagagggagactccgtctcaaaaaaaaaaaaaaaaaaaaaaaaaaaaaaaaaaaaaatttcggcctactctatgaagcacctggtaggtgtcccaatattttctggtatatgggaattacctttttctattattggaaggtctaaaaagcaaacaatgtgctccatatggctagagttagtattaaggggaccaagtagaataattggtagctagtgttagcctggagactaacatagtcaaagctgtcttgtcatgttatgtcttttttatttgtattgctccacggtccaagacaaaatttctgaacgccacttggacacagtgagtacctggtctgctctattgttctcaggagcaaccaactcaacccttatttctctgagaatgatgatttcatacagcacatctctctaccaagatgtgaaagatgacaccatggcatctgaaatagcttcaggagagatttgggacatgggaagcttgtagacaataatggaaaattctcttttagaatatagttacttgtatgacccacagtagcgccttttggagaatgtcttaaaattatctttattgaaagaacaataatgtttgttattaggataaatgaaataaggggaaaacctcagacccttggaacaatgggtttacattcaatccaatgattattatgtttttatattctgtattatttagaaaacagtagttaaacagacagaaatacagaagattgtttaaaaattaaagctattgagttagatccctttttgaaaggtcagcgtatgggagatgagaaaggcactatagagatcagagtgtttacacaaaagacatcttagcagatgacctacaaagagcacatcaagtatttatatcatccacatcaagttgctggtcatttcgcttatcaaagaaaataagaaagaaattttctttcgacattattttggtgtagtaacaatagagttttggaatcagctgttagaagcgataattaaagctagtttaccatgcttactaatcaatctacatagtcaccctgaagctttatataattgtccctttgttacaagcttctacttctccctatggtattctggttctgaatccagacaggtaaagaactaagtatggccgggcgcggtggctcacgcctgtaatcccagcactttgggaggccgtggcgggcagatcacgaggtcaggagatcgagaccatcctgaccaacatggtgaaaccctgtctttactaaactacaaaaaattagcccggcatgatggtgtgcgcctgtagtcccagctactcgggaggctgaggcaggggaattgcttgaacctgggaggcagaggttgcagtgaaccgagatcatgccactgcactccagcctgtgagactccgtctcaaaaaaaaaaaaaaaaaaagaaaaaaaaaaaaagaactgaagtgcttggagaccagtgtattgtaatatctatacagccaagcaggtattttcaactgaactttaaaaaagtactatttttgaaactttctttagtttagatagggccagccatttgggtagaaaggaaaagaaaaacaaaaaattggaaaaggatgcatcagtatttctttcagaaacaacttaacactaggaacagaaggaggattttattcaccaactcctaataaccacctgatgttgctgttgggctggccaaatatctgccaacattgatgatcctttcattcaccactagagagaagtagagggacctgatgtttagagaagcagtaaaacccatttcccattttctttcttcagccggatggaagtacttggaggctggtctcatattctagcactttagtgctggtgatgcagattatctctgctccagagtaactctgtgccatggaatccaagaggattctgtcgcaccaggacaggaatgcacccttgtttcatttgcttccatgaaagcagatttcagagattctcagatgctatgagactaattgtcacttagggtaggctccaggggagggacagagaagggcagtgctaataacagggactctggagacaagatcagcaatctaagaaacaaatgtgagacattttacccctccctaatctactccccttttaaaagttcatcttcattttccctttttctaccacgcagtaattgataattaaacacagctctggtttttaccatgcaatctagtagaacacctagacatcaggaactccttatctttggttatttatacaataatgaaatctgtagttcacgctaggctgtgtggacagtatctgcatctctggaaatcaactggaggcctttctcttactcttttccggttgctttccatttccttttccactgtggtccttgcctttcccaagctgaccagaactatgcacaaaaccagtcttcaataaatatcaacactgaagcttcagcaggttgttaactcctgcacagctatcttaaatgctgtatataagtgcaaagttttatggagcctcagaggtctctaagaacactgtaaatatcccaggtttaattagtagtcccggagttaggtaatggcctgtggctttctgcgctaggtctcttgaggtttctagtcttcagaggttgcctgcaactatgatgtgcacatatacagtactctttctcaaatacagcataaaccctctttagactttgctaggcacttacaattattgaacacacatgcagattgattctcattctctcaaagtttgaaaaacaactcagtgcttcaacctaggtctcgttagatattttttgactcaaattgtcgtctgtagttctacttcctaagggaaatgaaaaaacaataaattcccagactggtgttgatgctcattctctttaagcgggtcgactacttgctttgtagatccttgacgggtggggtgcggggtaggagtgcgatccaactctcagcatttccgaatcagctctctcacggtgacaggtcagcccaatcggggctgtaaacagacttgacaggtttgttctgggctgacggccattgactaggttctcagaccagataagtcacttggctgagtccacagtaggtggggcgcgctcaccagctcaggggtagtgactggacgtttgttgcaacatcggagaatgcacgctctgggctgcagcaggagataccctcaagcacagaaccaaaagggttcaccctaagcggcagggcatcagcgatggagaggcccgagagccctagcgcccagctccttttcccacgtttgggaaggcgcagaataggtcgatgtagagcaaggagtgagtctcaggtctcagtcctttggcttgctcttagggtagcaggcgaggagtggcaccagtttggggactctctccccgcgttctgtaagaatcggcggcagccagcaggcggggaggcgggggcacgtgtttggatgtgggtgcttgtgtaaccagttccccaagcgccagccccgacagcgctccttcgggaggctggtccgagcccctgtttccgccgcggcgcaggaagggttggggttccgctgcctgcaccaggcaagagcaccccgagcaaaggaagaagacgacttgcctccggagctatcactggggagtgggaatttggaaagttccccaactagggacacacgtgacctccttcggaaagtagttccgactgtggcccgtgtatccttccacctccttttgaaccctcctaggtctcctcgccccgcccactcgctgggctgcagcttcctaccgttccgtactttccactcaacccggtaaccccaaacgtgcacggtccggccggggcgcgcggagcctggccccgggcgatccatcctgccgggttttcacggcggccaagggggggcggggctaggtggtctctgagaaccgagcttgactccgacgccgcgaaccgacctggagcccgaggggaaagatgctcgactctcttgggggcaccggagcgggcgcaggagaggcctgcggggtgcgtcccactcacagggatcctctttcagttcatttagataggtgccctttgggcccttgaaattcaacggctatgtgttcacgttcagcacgctcggctgagagctttcatttttagggcaaacgagccgagttaccggggaagcgagaggtggggcgctgcaagggagccggatgaggtgatacacgctggcgacacaatagcaggttgctctttgtgctaagactgacaccatgaggacacagatttgggggaagggggaatctctaggcaaaggctgttacagtcaaatctctgcgaacgattgtgatccgacagcggtgcaaaaggaaagagcgaatgcagtccacgccgcggaaatctaggggtagaggcaaggggggagggtattccccttgcagggaccgtccctgcatttccctctacactgagcagcgtggtcacctggtccttttcacctgtgcacaggtaacctcagactcgagtcagtgacactgctcaacgcacccatctcagctttcatcatcagtcctccacccccgccccacaacagcctaccctgcctccggctgggtttctgggcagaggccgaggcttagctcgttatcctcgcctcgcgttgctgcaaaagccgcagcaagtgcagctgcaggctggcggctgggaaccggcccgagcaagccccaggcagctacactgggcatgctcagtagagcctgcggcttggggactctgcgctcgcacccagagctaccgctctgccccctcctaccgccccctgccctgccctgccctcccctcgcccggcgcggtcccgtccgcctctcgctcgcctcccgcctcccctcggtcttccgaggcgcccgggctcccggcgcggcggcggagggggcgggcaggccggcgggcggtgatgtggcgggactctttatgcgctgcggcaggatacgcgctcggcgctgggacgcgactgcgctcagttctctcctctcggaagctgcagccatgatggaagtttgagagttgagccgctgtgaggcgaggccgggctcaggcgagggagatgagagacggcggcggccgcggcccggagcccctctcagcgcctgtgagcagccgcgggggcagcgccctcggggagccggccggcctgcggcggcggcagcggcggcgtttctcgcctcctcttcgtcttttctaaccgtgcagcctcttcctcggcttctcctgaaagggaaggtggaagccgtgggctcgggcgggagccggctgaggcgcggcggcggcggcggcacctcccgctcctggagcgggggggagaagcggcggcggcggcggccgcggcggctgcagctccagggagggggtctgagtcgcctgtcaccatttccagggctgggaacgccggagagttggtctctccccttctactgcctccaacacggcggcggcggcggcggcacatccagggacccgggccggttttaaacctcccgtccgccgccgccgcaccccccgtggcccgggctccggaggccgccggcggaggcagccgttcggaggattattcgtcttctccccattccgctgccgccgctgccaggcctctggctgctgaggagaagcaggcccagtcgctgcaaccatccagcagccgccgcagcagccattacccggctgcggtccagagccaagcggcggcagagcgaggggcatcagctaccgccaagtccagagccatttccatcctgcagaagaagccccgccaccagcagcttctgccatctctctcctcctttttcttcagccacaggctcccagacatgacagccatcatcaaagagatcgttagcagaaacaaaaggagatatcaagaggatggattcgacttagacttgacctgtatccatttctgcggctgctcctctttacctttctgtcactctcttagaacgtgggagtagacggatgcgaaaatgtccgtagtttgggtgactataacatttaaccctggtcaggttgctaggtcatatattttgtgtttcctttctgtgtattcaacctagggtgtgtttggctagacggaactcttgcctggttgcaagtgtcaagccaccgattgctttcttaggctatctatatggtctcttcctgagggctattgtccgttaatacagaatacagtacactgttagtggattagcgagctcggtaatccggtctcctaaatgaacaaaaaagtagacgctttttgaggttgagcatatttcgattaaatcttggcttaggccctagatcaagggtttagatcagaataaaatgaaaattagtgttgcacgtacgcatattgcatcagaatcttgcagtgattgttttagtttcctgagttgcattgatagattcttttaaaatatgactgatttgcataactttagaagcagaatcattttcagtatatatggtgcacattgagggcaaaaagtagttttgttaatgtttaaacttaagttacctacaactttgaactgtatgtagaagttttgtagtttgaagtcaatagtgccataatataccttataaggcgttcttactagatctttgttatatttacctttttctctccctatggggtgatgtaggatagtgcttgaaatttgcacttcagtagcatttaatgttcagtgctcttgtcataaacatagaatggatattgagtagtttctgatcccagatggtaatgtgtaggttcaagggtattgtgtgtagcaagtgaagattgcagaaataaaacttcagttcatgcttgaaatttaagtattgttgtgatgccagaattgctgctcaccgtttttaggtttcaggtcctctgacaccttttggtatcgttaattttactgatttg

SEQ ID NO: 40 - DNA, 6478 bp, Homo Sapiens
tttattttgaagggatgttcaagaaatattgctaaatttaaaagtgttgcagagcaatatgtatcataagaccatactggtataatagcaacaaacagcacccccccacacaatcccaaaaaaatatacagatctatgccaagcaccagttaagatgcctggcacatggtaggtattcaacatttaatgaatacatgtagaggacttttacttttcactttatatcttttggacaagactttgaatttttatgagcatgtattacttaaatctagatttatagggagtgatggaaaatgtgaaaataaaattttaaaaaggaaaagaaagagtaaagatctagatttaaaaaaggaaatgtaaacaagatgaaatagccaaagataggtctccccaaaactaatgttgagacaatgccaccagcagtgacagtcagctaagagatggttcgcagctcactgctcagtactgaggcattcagcaggggttgtatttaactttcaagttggaaccaaccgaaactgttgggcttgaagagctgtctttatgagtcatcgacggcagaaagcacagaagcactaaagaaaataattcagaaatgtggaaagagaaaagtatgcccttgtcttgggagaacaatatttgtgtgtaaccaagtaggaagactttgtggaggaaagtctgaaaaagcagagagctgaagagaaaagagccaaatgaaggacacggtggccaacactcaaagtaaaaagacatttttgaagaagatgtgtttctagggtttctaagaagtcgctatactcatgcccagagccaccttgcaagttcatttggaaagtgcattggtgtcttttggtataagatccacgaacatcaacagtcctgttatgtgagcaggtgttcatactgaagggccacaagcaaagtttccatgtgttattactgttagaacttcccccgctcccttccaacacaaaagcagctctgcctgctagtatggaagccctgggaagagcctcatacttgcctcgtgctgccaacatctctgccttggcttccctgctggaacacacaagtcactcagtactagccatttattcttctggcagaactgtggcaagaggggattaacagggaaaaaaaattaaaaaacaaacaaaaagccaaaacaacatgaaagagctgggcatgtctttaaaacaatcagtgtccacctcccccagccctgtgcctgtgtctgcctgcactttgcatgtctgcccctgtggtggggggggatatgtctgcgcctctgaaaatcttcttatttagacatcacaaggtattagcccaattttgaacacagccggctgcagtacggtgcacagacacgactgctctttcttcagaaaactctccagttcaaacatgtttgcagagcatgattcatggtgtttctttctggattgtccagtgggtaattgctgtacgaaaaccagagaaacagatgtagaccctgaaccctggctataaatttttgttttatgattatgggtttcaaatgtgctgtgtcacactgacaaatatacagttactctgaaacaaaatggattttactctcaaagttttgctttttgtttttcactttttgtttgcttgttggttggaaatacatttattagatcattgatcaaacacaaagaaaatagagatgacacatatcagaatgttattttatgccataacaagaagatatttgggaaagtttcttccaaccctgtggctaatgtttaaaatgggtgtcagtagtttacatttcattacggacaaatcggtctatttttcactttctaccctactcattaatctttatagtgcacggatctgtatttaaagaattatggcttatttatgtatctttccttcattttacttaaaatgaagaatttggagacagaatcaagttttcaagaagtgtaagcatttactgatgaagaaataattagcatgtggctaaatcatgggtctgttttataaattaatacttggattaagtaatagctctaattattgctatcagcataattaattcatgatgaggaatgattaattgactagcgaatattgtcatattataagaaacccatactattcctttcatggggatttaaatactgattattcatttcaaggcccaagttcatttctcagttgagaacttcaaggtaattatatattttacattttcttgcacaaagaaagaaaacatcgagtcgcccaacctttaccacacacagagagagacacactaatgttgttatttttgtgcaatgatacagtatagaggtaagaaattcggaagcagtggtctcgctcaatgaggctgattccatagcttaagaaatgagaatgaacagaattttgaggacacccatccccatcttcacttccctgggaccagtgcatctctactctttggagagatgttaagcaagaatgtgcagcagcctcccctggataacagatccctgtacacacatacctgtcagtgatgccatgtttctcatctctaacttaagtttctcctgctctacttccaatatagctgtttcctcttctcttgtctaacaacttttcatccacctccactgtccggtaaaaatgaactcagtttccaaggaactctaaggaccttaaataagcatttggagccataagcctcatggaccaagtagaaattggcacataatgtagtgctttgtgtatctttacaactaccttaatgacagtgtgttaaatgttttgtaaattcctctgtgttctcttgcttaaaatgtgtgttttctttgtagttaaagggtttcttacaataagtctctgttacaaaatgatggccatataaaagagagaagagaggcgcaaaaataacaaacacagattcagcaaaaatctcacccctttattgccctgaacttttcaatagcaagaactgagcttgctgggctgaaaattgttttaatgtaccttcataaaaggatctttgacttggtaagtgtgtgcgatgcatacttttcatgttacaccacaagtgccacttagcaactccactagacagggcagtgtttcagcatggggtggggtgccccctgacaggcttttaaaaggcccggatgccaatgcacattccaacactatccacaaaaaggagactggagcagtgctcttccctgcattgggcaaggagactctccctccctgcctaaccacttgcctgccctgttttgtgggagaattacaagtaaatgctacagaggcagtggagaaaaaagggtgttttaattcctctccagagtttcctttatttgatgtatgttgcatcctttaaacaagttgtgcaaaatggctgcagggtagattggctctcccttttaaagctctccatccggctgggtttatttgtaaatactgcatctatccttcttagtgttttaggactggctggaaagactcttcttcctgtaggttgggtcagtgtgagagatctaaaaaatcattttcccttaaaattactgtattttaataaaaggattgggcaggggctggaatgagagaaaactggtccttcaaaatgtaaaactgtcatacttaaaccagtttacaaaatatgcgtttaattatgtggtgggatgtgtgtaggtgtatgatgagagaggcaaccaacatggctatttggggtgcaaggatgtgggaacaggcaagtaattttcacattggactttcatcctagggagctgggttctagtcacagctctgagctgtgtgaccttgggtaggtctcatctccccggggttttgtttcaccagttgaacagtatgaggatgagtcacagctaacatttgttccatgatatttacccagcaccatacaagtgttatttctgtcctcccagttaacactgacgtgggtagtattatatgcccattttacagatgaggaaactgaagcctgaagaagttaaatacttatcccagaacacacagctggtaagtggcagacctggaattggaatctagttcagtttgattccccaacccatgctcttgaccactatactgttttttcaagtccagatctgaaatctcattttctgtgtggctgtgtgtttgggacaggggtaaccaattcctgactactctatatgctgcatagaacctggagaggatttttcaaagtaaatgaatctcgaaagctggattgcagagcaaacgagtgcagtcaattcagccaggggcttgcaagagggagaaagagaaaaagactgtggaatggaaagtttcccaacccaagcctttcccaaggggtagccattctctgttctacagtttagggcttgcatgtgctttttctggagtggaaaaatacataagttataaggaatttaacagacagaaaggcgcacagaggaatttaaagtgtgggctggggggcgaggcggtgggcgggaggcgagcgggcgcaggcggaacaccgttttccaagctaagccgccgcaaataaaaaggcgtaaagggagagaagttggtgctcaacgtgagccaggagcagcgtcccggctcctcccctgctcattttaaaagcacttcttgtattgtttttaaggtgagaaataggaaagaaaacgccggcttgtgcgctcgctgcctgcctctctggctgtctgcttttgcagggctgctgggagtttttaagctctgtgagaatcctgggagttggtgatgtcagactagttgggtcatttgaaggttagcagcccgggtagggttcaccgaaagttcactcgcatatattaggcaattcaatctttcattctgtgtgacagaagtagtaggaagtgagctgttcagaggcaggagggtctattctttgccaaaggggggaccagaattcccccatgcgagctgtttgaggactgggatgccgagaacgcgagcgatccgagcagggtttgtctgggcaccgtcggggtaggatccggaacgcattcggaaggctttttgcaagcatttacttggaaggagaacttgggatctttctgggaaccccccgccccggctggattggccgagcaagcctggaaaatggtaaatgatcatttggatcaattacaggcttttagctggcttgtctgtcataattcatgattcggggctgggaaaaagaccaacagcctacgtgccaaaaaaggggcagagtttgatggagttgggtggacttttctatgccatttgcctccacacctagaggataagcacttttgcagacattcagtgcaagggagatcatgtttgactgtatggatgttctgtcagtgagtcctgggcaaatcctggatttctacactgcgagtccgtcttcctgcatgctccaggagaaagctctcaaagcatgcttcagtggattgacccaaaccgaatggcagcatcggcacactgctcaatgtaggtttatttttttcccttcttctaccaagaaaaaaaaaattgtctctcttgcatgcaataaagacgttggaaataaactgcattggtagcaagacaaaggatttaatgatttaatgctgaaggggtgtgatatgctggcatgcatattgattccctttgctgaaaatttcctgttagatgttttcttcccaaataacccctcccgcccccatgctcctctccttaccaaccttatagtctcttgaaaacagtttttaaaatatgcataaaaatgtggggggtggggagtagagggtgaccacaagactttaaaacattcttcaagtagggcaatttgacacattttgcagtttttactaaaatgtatgcagagtggaatttaactttgctgttctttggattagctactagttgtataggtccccccaccccttgtgtattccaacagtccaaagtaattaaaatatgacattttccttgaaaggaatttagtttaattaaggtggctgctgctcccgaagttcataaaccaccagttcaagctgccgcttccaatgttttccttgctaaggaaaggcaatatttcttagcattgaccctgctgccacctttccaagtcactttgttggtctaagaagttgctgttttgctagaaaactactggcaatgaacaccccttggactgagccatccattatttccatatcttgcagttcagcccggaacgtggacatcagttaaaggaaaggaaatataagtggggtagcccaatttaaaaaaaaaatattgactattttgttatctgatgctgacacagtgccgaggtacgcacctggtcaacagtagcctggctgcaggcttgagaaatgatcaggagtcccagaaaatcccaccttcgggtggctgtagtgggagcctgcaggatgcttcgccgccctgacagtgatttagataaatggctcagctatctatcaaaatgtttttagtactttatttg

SEQ ID NO: 41 - DNA, 2534 bp, Homo Sapiens
aggcaggaaagtgggacagccggggagctggaccccaccctctgtgagccccgctggtacctgatggcatgtggcttggagagggcaggtgacctggcgtggagggccagagggtaaatcctcaaacaagtggcaacaggccaccaacttgaaagggaaaattgtgtagtgatgggaaatgtgtccaacaaacctactgggtgactaattacaaaggctgggctggagcttcagaggctgcttgttaaacacttcattaagcggcactctgaaagctgccacctgcgcattctgggagctcagaggggaccctgagggggaatgaggcctggaggatggaaccatcttcaggtagactgagaaggagcctggatctcacttccaaacacagtctggagctcataggtcagaggcctcaatgggagaaaagctaaaggaagagggtgcagaaaggagtttcagggaattggtggctatgtgactttgagcaaatctcacccctctctgagacttagtgttcccatctctatggtcctgtgtgtgtcacagagacatggtggggattaaattcgatcgtgatatgaaagtgcttgggaaactccatggccctacctaaacatgagttatcctcacctgaaccaaggggggaagttacctggcaggattaggaaccccatcctcctgaacctttatgggctctgtcgaggctgaagcagccaggggctaaagccagtccttagcccctggaagggcactgtgaaagtggatctgatttgagaagccgtttcctgatgtgggcagccatgtgatgccagccccgaacaagagggggcagcctggagcctggaaaggtgccagtgcaggtggggcccacgcccagatttctcctgctgactgttctgatgattcacccccacatcccagcctttttacctttactgcagagccggaaagggtgtggggaagagaggagagggaggcaggtcttgggccctggtcccgccccctgctcctccccacccttctctgggcctggccacccagccaaaaggcaggccaagagcaggagagacacagagtccggcattggtcccaggcagcagttagcccgccgcccgcctgtgtgtccccagagccatggagagagccagtctgatccagaaggccaagctggcagagcaggccgaacgctatgaggacatggcagccttcatgaaaggcgccgtggagaagggcgaggagctctcctgcgaagagcgaaacctgctctcagtagcctataagaacgtggtgggcggccagagggctgcctggagggtgctgtccagtattgagcagaaaagcaacgaggagggctcggaggagaaggggcccgaggtgcgtgagtaccgggagaaggtggagactgagctccagggcgtgtgcgacaccgtgctgggcctgctggacagccacctcatcaaggaggccggggacgccgagagccgggtcttctacctgaagatgaagggtgactactaccgctacctggccgaggtggccaccggtgacgacaagaagcgcatcattgactcagcccggtcagcctaccaggaggccatggacatcagcaagaaggagatgccgcccaccaaccccatccgcctgggcctggccctgaacttttccgtcttccactacgagatcgccaacagccccgaggaggccatctctctggccaagaccactttcgacgaggccatggctgatctgcacaccctcagcgaggactcctacaaagacagcaccctcatcatgcagctgctgcgagacaacctgacactgtggacggccgacaacgccggggaagaggggggcgaggctccccaggagccccagagctgagtgttgcccgccaccgccccgccctgccccctccagtcccccaccctgccgagaggactagtatggggtgggaggccccacccttctcccctaggcgctgttcttgctccaaagggctccgtggagagggactggcagagctgaggccacctggggctggggatcccactcttcttgcagctgttgagcgcacctaaccactggtcatgcccccacccctgctctccgcacccgcttcctcccgaccccaggaccaggctacttctcccctcctcttgcctccctcctgcccctgctgcctctgatcgtaggaattgaggagtgtcccgccttgtggctgagaactggacagtggcaggggctggagatgggtgtgtgtgtgtgtgtgtgtgtgtgtgtgtgcgcgcgcgccagtgcaagaccgagactgagggaaagcatgtctgctgggtgtgaccatgtttcctctcaataaagttcccctgtgacactcctcctgtctctcttccagttcttggcgatgggctgggagtgggactggaatctgacttagagaccctgactttggacctctgagttagggccctgaactccctaggtggctcagtggcccgcacgcaagactttgagtccaggtgaggccggggtcc

SEQ ID NO: 42 - DNA, 6558 bp, Homo Sapiens
caagatcataaattgcttctcatcagtggggaaggctccaaacattatgcatctagcataagtaggtgtaaccaaccgtaacggcctgtcctgttactcccgattaacacacaattatcaggttagaactgcattccacaagtctcttgcgttcagttatcctgcatatattaattctcccaagctttgtgctttaaaagaactgtacagtgctgggaagttctttacccattccaatccttagggtaccgagctcgaattcgaatcaggtatcaggcatgctccatcaccacaaaagatgcaaaaagatgcgcacagtggcgcacacctatagccccagttactgaggaggttaatgtgggaggatcacatgaggctgcagtgagctgtgatggtgccactgtactccagccttggcgacagtgagtctatgtctcaaataagtaagtaaacaaaaattaaaaagaatccagtccacagggcatttgaaggcaagaggaaaagatgccagaatcagagatggggagaagatgggcttctggcgcctgctgaggttgagaaatgagacagataggctgagtgtggggtggagagaggatgggcagagagactgaggctggtctgaatggaaatgaaatgttagggctctcagggttatcggggaataattggagcttctaggaaaggtttaacgttgtgaccacctgtgttcgtcatgcctccccaccccttactaattgtgtgaatttggcagactttgagtctcagtgttctcctctgtgaagtggggtcatcttattccaactcctgggattgttgtgtgaattaaatggggtaatgtacggagagcacctgacgcacagcgagtgcttcaaaatttcagtctgcaccccccagcaaaggatatgcacacgcccattgtgagtgacaaatccaggatgacctgaacccaatgtgataacgtgggtcctcgcatgctggtcatgctgccgggagacacttatggatccaattagtacaacaggggaaataaattatttaatgcattttgctaagacagaatacctcagaacttattttgtggggcggggcataataaagggggtccttctgctgaaaacgtttaagctcaggttcgtggcaccactcaaccaaggtcgacagtcacacagtaagccagaggcaatgtcaggacttaaactaaacctgtggcccccacaatgaggccatttctctttcccctgaacggcctggggaaagggggtgggtgggcagaacttggcagtggccaatccctcacttctgtcccctggttttctcctgcccttatctctaggcttgcattgattgattgattgagacagggtcttgctctgtcgtccaggctggagtgcagtggcacgatcatggctcactgcagcctcaaactcctaggctcaagtggtctttccgcctcctatctcccgagtacccatatccctaggcttttaaaatggcttccaggtatctggctgccgtctcagacatccacctgggcttctgggcagggactgtccgggaaacctcatctatgtgaagcaggtgtgggtgtaggaaggccgcttggaaatgaatcagcactgtctcctgtttgagtcgtaagcagggcgccagagggtctggcggacaagaaagggaggatgacaggaggccggcactgcaatgacacgccttagccaccagagggcacgaagcagctgggcaaaatcccgcggggccgctggtggaaaatttctggcacctggagcccggagatggggtggacggaatgtgaggacccagcttcctgaggctgggccggggcagagtcactgctttggatgtccgcagggcctgcttgtgtcttgactactctgcctttgtagacagctggagaatgtgagagtgggattgggatcggactctaggggccattccgtacaactctcctgccctgccgtgggggagggagttgcccaaggttacgcagcaagttagtggcaaatgaatacgattatcaccagtctcaggtatatggccatttgatgggcgcagtcgcagcctcagttcctgagacagagacacctgattaaggacaggccttcaggagctgaccctagtgacccgcggctctgctgctgtctctgtttttctccctggcttttccatctgactgactctttgtcttcttcgtctgcctgcctgtctccgtctctgcccgctggggggtttgctcaactccctcactgggtcctgggagccgcagtttcctgctgtcactcctcagggatttgtagctctctgaagctcttttccgacccgttgtctcggttccactcttgggatccagaggagaggtgattatttcgtagcatagtcagtggtgtgatttcacggggtgagaaggactcccttgctcctaagcactcctccagtgacccctgttgccatgtggtagccgtaagcactggttggcacctggtgtgggcgagacccttacctcatgcagaaatgagtaagaccggtgagctcaccatgtgggggtgaggctgagagaaaacaagtacacaggtgattcagtcaaaatcagaattctctaagtacacacgaaaagggcaaaaggggcgctttgtacaggacagaacaggtagacactgaatccggttgggccctgggaaggctccctgcagtggcctttgaagggggggttggatttcagcaggatagagggcatgggcatgtgtgggcacgttctgaacagaggggtcagcgcaagccgagggtcttggccacactagttgcatgtgccggtgtgtttaagggacacgcagcagcaggccgagtctggagcgcctcactgccaggctttttaaaaatttttaattttaatttaattttattttatttttactttaagttctggcatacatgtgcagaatgtggtttgttacataggtatacatgtgccatggtggtttgctgcacctatcaacccatcatctaggttttaagccccgcatgcatcaggtattagtcctaatgctctccctccccttgcccccatccttctccccgcaactgcccacaggccctggtatgtggtgttcccttccctgtgtccatatgttctcattgttcaactcccacttatgagtgagaacataccgcctggctttaagggacagccatggggatgcactgcagtttctgagcagggaaggccctgtggaggcccttagttaaaaggaaagaatggctgtgaaaatcgatgcattgcgctcccttgtccctcaccctcagtgtgaagggtttttattccgagttctacttgaagtaggcctcgatgggaagacaagtagcatgaggggttcaagtactgaggggagcaagggacactcggtggctgtgccaaggtgtagaagaggacactgggggccccaaggcctgacttcatgtacactgctcaggctggcccccaagtcacacggtgaccgctaggaagggaccagcctgttctcagtctgatcctcctgccatgtcattatccaaagctcctcctggcagggcctgtttggggtctctgtgccagtgctttccctgccaggctgggctggggcttccacctactgctctgggactgctgctgccctggccctgggggaggagggtgtgccgctgagtcactgcctgggcatctgggcctggaacctcgggtgagtcacttagggctgaggtagaggggctgggggaggggaagaagctactcgacagctggagcagggaggggagctggggccacaggaagggcggtgccctgatgcccagacgggccgggatagacaaagggccaaggaggaaggggccctgggagggggcagccctcccttgggctgggctctgaatggccacagtgtttgcctttctccgggtctggggaggacatgtgtgtggggggcagtgagagagggctgtggctgagggctgtgcttcaggcctggattctggcttgggaagctgtccagctggtgttttcagccttgggtagggatgtacccctacccacccacccagccctcaagctggagaagaggaggccaaagttttcctgttcagcctttaactactcgggacttccttatgctccccacagactgtggcccagcccaactgcggctgtgtgtagagcaaccccatttctcactgcttccccatccttccagacaccttcctacacagagggaccttcccaggtatttctaagcacacttagttacctcattacctcattaagaggtattctggtgctggccattaaaagtcactccacttcatccatgccctgaagtcagtcctgtccttctcctcctgatgtcccccagctgcctcctctggcccccagcttcctaagggtggccccaggttgcttctctctcacacacacaggcgcatgtatgtacacgagcactggaccatgaagtctcagcgtgtgctcacagcctctcacacaggagtgggctgtgactcacaggcatgtcatgagaatgaggcctggcaccagtctccaggccccagagcaggggttgcctcccctcaccccggtccaggatgcccagtccccacgacacctcccacttcccactgtggcctgggtgggctcaggggctgcccttgacctggcctagagccctcccccagctggtggtggagctggcactctctgggagggagggggctgggagggaatgagtgggaatggcaagaggccagggtttggtgggatcaggttgaggcaggtttggtttccttaaaatgccaagttgggggccagtggggcccacatataaatcctcaccctgggagcctggctgccttgctctccttcctgggtctgtctctgccacctggtctggtgagtacctctgtcctgctgagggcagggtggggaggatccccgtgggtctctgtctttgtctccacagttctctcattccagcttccctggtgggatcaacctgggcctctctgggccttcccccttggaagaactctctgtgaagtgctgaagtgttgactgaagggttttttttttttttttttttttttgagatggagtctcgctctgtcgcccaggctggagtacagtggtgtgatctcagctcactgcaaactccccctcccaggttcacgccattctcctgcctcagcctcccgagtagctgggactgcaggcgcccaccaccatgcccggctaatttttttgtatttttagtagagatggggtttcaccatgttagccaggatggtctcgatctcctgatctcgtgatccacccatctcggcctcccaaagtgctgggattacaggagtaagccaccgcgcccggccgactgaagggtttttctccaggttcctctgtgaggtctcagtgcaggggttgctctgaggccctcccctggatatctcagtctaggggcccttctttgggggtctaggcctaggagcaggaggtgtgcatgtgggcgttgctgcaaaaagaatcctgagatttttttttttttttttttttttttttgcaaagtcctggattctagcaggactaaggtgcaagaggcaggggtctcaagactctgcctgggtcatggccccaagcagcaaagctctgccccctgcctcggtgaaggcagggctggcatgatgggcccagggcatgccctgcctctggcatagctcctctggcctcaccctgaaacctgcctaacctttccaggctggtctgagtattctcagaggccttgccgctgaggtctgtcccatcctgatcccaaggcaatgaacatttcatatctttaattctaattccaacaggatccttcctggtggagagaatgttaagttgcccccaccctatccatgcccctgtctgcctagaggctcaggggccttcagggtgaggggagacacattccccaccctctgggagctcctagtctgagagaggaaacactcctgcccaagggagcttccagttagatggcagagagagatgcctctggcttcaggagtcccgagtctaaggagggaaacgactccttcagggagcttcctgctcctaggctgtagccatggctcctgccagactgcacaggagcccccatctgccagccggtgcatgtggccctgctccccagagcctgcgcagatgccatcaaaatgggactctggtcaccctgtcatttcccttctggcagacactaaaatggggagccctgccctcaggggggtgtcccaagtgccatcagaggaggcttggtgactcccagacacaagggaagctttagcgtctgccctcagggtgagatggaggtatcgcctccggcctcagggaaccacagtctgagggggagatgcagcccctgccttcccattcagagaggggttttgtgaggtggcttgggggcatagggcagaagtggatcctacaggctgagctaaggccccaagagcctcagcagtgtacccatcacctggcacctctgcagc

SEQ ID NO: 43 - DNA, 6432 bp, Homo Sapiens
caccacgctcagctaattttcgtatttttagtagagacagggtttcacaatgttggtcaggctggtctcgaaatcctgacctcatgatctgcctgcctcggcctcccaaagtgctggaattacaggcataagccagcatgcccggcccatattctttaactgtatgtacaatttaatttgtagatgatcctaaaagtctaaattggagtcctactgtcttcctcatcttcagcccccataacaaacctcatgatagtttttgtctataagaacccctttgtagttttaccacctgcaaattatttaaccttgcttttccgtgattcctcacccttcacatcccttatatctcttagctattgcctcaaaaattctggataacaaaccaacccaaatttttccttaaacggcatttacttattcttactcagactcatatggattggctagaggtaggcttgagattggctgatggaggtctggcttagattcaatcaggaggttggtccacatctgttccacatgtctctcctcctccctgcatttgctggtctttaagtgccttcaactgaaaataatcagtataccaaagcagcatattttggagtggcatttcctgaaatccttcactggtcaggtggcgaagatcaaccacctgatcaatttgttctagagtgtagaacaagtctggaactagacaggactaagttcaaatctgggctctgtcttttactagctatgtgacctttgtcaaatacttaatctctttaatcctcaaattcttcatttgtaaagggaagattagaatagtactgcaaggacatgctccaaaatttaacaaggattatctttggataatagggttaagaatccttttaaagtctgcctttaaaaaaaaaatctaaatttcctacctataattaacacgtattacccttgtaattttcaaaaagttatttttttcaaaacatactattgatgctttctgtaaacatgtggcataattgcaggttctattaatatctgtgaagaactgcaaacaagagaatggattaggaaaactgatattcttatttttctctctattgaagacaagaaacacacactgaatactgattatctgtagagcacggagtgtggttctacattgaaaaaggaatattttgtgcttttaagggctttacaatcattagggtagaattctaaaaagcaaataaataacaataatgtactccatgttagaatggggcaaacatttttttttaaaaaaaggctaaataaacgaaatgttccctgggttatccctgggaaaggagtgatcacagtaggtgaagcatcacaaaatatttcctggaggaggtagcatcatggatgacccacaaagggtggatgaccctcacaaattaactacagtctcagtgcttattggtttgcttcacaataaaaggaaaattggtcaagagataagagctgagaatgaggctggttaatttataaggagaggaatctccctgttaactgctctagctgacagtaacctcaacagctgcatgtcacaaagctcaggggagtaggaagttcttctctcatcacaactgagaaacccaacgtttaaataaaccacaatttgattcagttcaattgtgtgtgtttgtgtgtgcgtgcagagtttaaaaagctggtaaaatagattgtcagcttttaaaatttctgttcaagttgatatttattgtttttcaactcattaagggcttaaacgttaccttccttgttttttaaaccctgagtcgggctattatttttttgttcccatttgcaaatggcccagttttttacatgtatatattaactgcttatgtgaatacacaaaatattatactaagccaaatatacaactatgtgtgaaaatgatgtcttgattaagggtatcagacatccctttcaacaagaatttcaaaaggaagggcatcatgacaatttttttttctttttcttttatttattttttgtttttgagacagggtctcattctgtcttctaggctgaagtgcagtggcacaatcatggctcactgcagcgttcgtctcctgggctcaagtgattctcccacctcagcctcctgagtagttggcactatagatacatgccaacatgcctggcttttttttttttttttttttttttagtaaagatgaaatctcactatgttgcttaggctggtctcgaactcctgggctcaagtaatcctcccatctagacctcccaaagtgctgggattacaggtgtggaccactgcactcagcctgatgaatttttaaaattatcaaattgcaatatgcatgagtttacacatctattatttttattatgatgattttcaaaaggctagcttgcacttggcaatgctgaattctgattcttctcaatttcacaggagactggagattaaatcagaaatgttaagggcaaacaaaattaaaatcaacattaatgatgtatcatggcaaagaccaccagttaaacattccaccatagatttaaatatctagcctccaacaatgtaaaacatctttgtgataattaaggaaaacaaagcttttggaatctattggacatttatttgccacattgtgttttcaggagaaagaaagtacatgtttgctatctggaggaacttgggcaaatgtaggaaaaaaaaaagaagaagaaagaaacccacatacttctccattcttaagaaaaggaagtagtggtgacatcattctcggctaaaatgtagtctgtttatatctcaaatattcggtaacaatgttttctccagagttatgaagcaactagaacaatcaaatacaattttcttctaaatctttattgcctgattcattcattcatccaacaaatatttattaaacatcgattatgtgtttgatgcttagggacacaatagtaagtggagggaaagatacataatacctgccctcaagaaatttggagttgagtggaggatagaaatataaattaaagaatgacacaaataattataaagttacagctgttaaaagaaaagcatatggtgccaagagaacgtgtaatacaagatctactcatggaggtgagggaaagcttgcccatcaaagaagttatgattcaatccacgaagaccaggagttggctgggtgaagaaaaaaaggtcagaggaaggaagtccacactggggaaggctctaagcataaagggtaggaggattacagaggcatattcacgaaatttggagaaggctttcagtaagcaaggagaagccaaatgaaagtttacgggagagttggaggcttgaagacacgttcaaggatctggtttttatcttctctttatctcaagagcagtgggaagccattaaatgattttaatcagagggttggtataactagttttgtattttgaaaagctgaattcagctctcgtttgagaaactgagtgaaagagcccagaacggccgtggctgagggtgactcgtgggagactcctacacaagccatggcagtggcatgggctggtggcagaagagggaatagggagaagatttggaactcaatcttcctccattgacaaagtcactccagctttggcaaggcaattaattggtgggaaagaagatgcctagccctcctgatttcactgcactttctgcatcttcaacatgagtactgggaagtggcaaaacatccagaggcagcttgggtgctaggtggagcatgagttaaaattccaggatgaagcaaatgaacacttagaatgacaggaaagatttgggagttgggtttgggggagggctatttacctttattccctggagaccctggcacaaacccttgcctctgcaatcttcctctcaggtaaaggaattcattaaatgaattgctagaagatctactgaccagagggctgtacagaatcatatctttgagagtgggaagtaggttgatcacatagtttattatccaatcaggacatatctgaaagagaaagggggttctattaatatttaaactacaaaacatgtacaccaggaatgtcttgggcaaatctggttgccctagcaagaaaggaaatttgaaagtttatactgttctgctcccatgttaccccgtttgcacatgagagggtaagtattctctttcttcacctgcattaagggaataaaagcacaagcattcaggtgactcccaacccacttttaattttacagtttctgctatactctatacattctgaaaattacatttcccaccactatcacttcgtgataggtgatcatttacaattactcactgactcagtcccgggaagaggcggtgcaaaatgggacgctctatccaggtgctcattagaaatgcagaatctctgcctgcctcctagacctactgaattagaatctgcatttttaaataagatttccaggtgatcaatatgtacattaaaacttgagaaaaacctctagacttcgacctaaagaaaaacattttacaacttgacagtgtatgcacatacatacatgcatatagacacaactgaagcacaaatttaatgaagtagaatttaccgttactattttatttgggaaagaaatgtgctcgcgactcaatagattggagtattcactcctggatctcaacttgcaatttgaaaacgcatctctaaagcacctaggagcaatctgaagaaagctgaggggaggcggcagatgttctgatctactagggaaaacgtggacgttttctgttgttactttgtgaactgtgtgcacttagtcattcttgagtaaatacttggagcgaggaactcctgagtggtgtgggagggcggtgaggggcagctgaaagtcggccaaagctctcggaggggctggtctaggaaacatgattggcagctacgagagagctaggggctggacgtcgaggagagggagaaggctctcgggcggagagaggtcctgcccagctgttggcgaggagtttcctgtttcccccgcagcgctgagttgaagttgagtgagtcactcgcgcgcacggagcgacgacacccccgcgcgtgcacccgctcgggacaggagccggactcctgtgcagcttccctcggccgccgggggcctccccgcgcctcgccggcctccaggccccctcctggctggcgagcgggcgccacatctggcccgcacatctgcgctgccggcccggcgcggggtccggagagggcgcggcgcggaggcgcagccaggggtccgggaaggcgccgtccgctgcgctgggggctcggtctatgacgagcagcggggtctgccatgggtcgggggctgctcaggggcctgtggccgctgcacatcgtcctgtggacgcgtatcgccagcacgatcccaccgcacgttcagaagtcgggtgagtggtccccagcccgggctcggcggggcgccgggggtcttcctggggtccccgcctctccgctgcgcttgacagtcgggcccggcaacccggcccccgggcggaaacgaggaaagtttcccccgcgacactcacgcagcccgactcccgtagctgcagggattgtgagtttttcttgaaaaagagaaggaaagttcagttgcaaggggcgcggggcacgtttggtcccctttgtgcgagcaggaaaggcgttgtgttggccgcgttcgaggcgagcccccacccccggaaagggaagtttgagaagttggttatctgaaggcggccggggagcagcggcccggagcggcagcctgagctgccaaagcagccagcgcacctgggccactccgcccatggcgatgccgcgtgcccacccagctctttttgagccacccgttcaaaaggccagctcctcagtccttagctcctggagacggccacgctttccctcaggccggcttcttggcccggagtttttggaaacaagtttcaagaaaataatcgatttccaaaagaaagttagctggctccactgacgccttggcatggatggatagggagtggagatgctcaggtgaaaccgagaatccctcactgaatgcctactgggtgctagaggctgtagattttgcctggaacaagatagtcctgtcttcagggagttgatggttctatgcaattatcgtttgttggaaaccgaagggttaaaatcctaactaggctacccacctgatcgctgtctctgaaggtttttaaggaaaaaataaaaataaaaaaatatatatatatattatatatatataaatatatatataattatatatataaatatatataatattaatatatatatgcatgcaggaatgggggttcttaactatttgttatggaaagtgtaaaacctctgagacttcaaaagttagattttttttttttggagacggagtctcgctct

SEQ ID NO: 44 - DNA, 7309 bp, Homo Sapiens
atgcgatcaatggtgttaactgctctttggactgtccccacagcacaggacaagaccatatcagttccagcaggttccactgaagaaagctcatgtgccttgcagaaacaagacctccagcccagtctaacaggagaccaaccacatgtccatcccattccctcccaaggcatgacagcacctggctgagatgcttgtgtgtattctctgtgtgaagctgagcatgcaaccttcaaagaaaccacaaaggagctactcgtttttaaaggaaaaacacatgaactccacgggcataaggaagacattaaaacagggttggggagaagttcttctccttccatttcatagtacccttcacagaaataattgactgcttgaatatatggtcattgaaacatacatacacacacatacatgcacatgaaaacaagagctggaatatttgactctgctttccatttcccaccaccctagataacacaggatacaacatggctttactgcacacatgtgttttctggcttaaaaacactgagagtagatccctgtggaaagaaatatgaaaacctgaggattcatgcgaatgtagccagaggcgaatgtagccagaggggtcttcaatttgctggcagagctgggggagagctggggcaattttactgccatgaaattggctccagatggaggcaaggaaaggtgtttaccccctgctggtgccagacacagagagatcctgcagtacctcgcatcttaggctcagaattgcccagtgctgggcagcagccccactgagggtctggccagagctcatggggatgggtggaccaggctgtctgttgcttggaaaaggccattttgaatataatgactttcacatggacggtggggcttgggggaaggcatcgtggctagggtctggaggggaagagggaggaaagcaaagaggagcttccctatgaggcaacagaaatgacagtaccttctccaggttgaatttccaaaacccagctctgccctggaagactgggactgtggcatcctctgcagtgttcccagaccgccctaaggcccccaaaccaatgattcacaactatgttgcttccccagagagcatctccccctttggttgacatgtggccagctcaggggtggaggagctccggcagccacgaacccagacgggatgttgactgagagctttgtggccatggcagatgggaggggtgagcttcacccactcaaaggcacccgcaccccaccgatgagtgtggaattgtgctctcccgccctcgcagtgagacgaccgaccaggactgcaggctgagcaaatgggtgttctctggcttatagcgccccctagcaccagccagcgggatagagctccgtgaactctccaaggagccaccacctgcctgtctgaatgctggaaaggggtcggtggtgctgatcattggacccattcaaccaatacttattaaactcgttgttaccaacacttaatccctgtgttctaggggcttagactccagcaagggaaacagatgggtaaataatcacattagagtcagctaagtattgtcaaagaagttgatacagggtgttgtggggatacatgggaggggaatcagaggaggtttcccggaggaggtgacatctaagctgaggtctgaaggatgtggaagagttcagtaactcctgaagaccaaaaaaatggtgataaaaaagacaccttcctaactttttagtgctacgatccaagagacaaacaagcaggtgaacgcataactacactgggctccaccataagccagagcctgtctctcctaggactttggcatcacaatcttctctgaaattctgttttcggcattgattcttgggggaggtagcaatataggaactcagtgttcgttgcgaaactgatggatggtcttcagtcttgggtacgttcccatgtgtcaaacctgtttaaatggcaggacccatctccccttcagaagcattcacttgtcctacaggattccccatggaatcttggagtttttgaggcgagagggatcctggataccactgagttctatctttcatccaataaacacagaagtggacgcctggacaggcaaagtgacttgaccaaggcaggtgcacagctattctgcaacattgggaacaaatctcaggtcttttgattttttgtttccactttactctcttttcatttcccagaaacaaagttttcatgtgcttttttttatagtgatatgtttggaatgcattagctagtaatttaggaagggaaaaaaataaacacacaagagataaacctgtcaggaggacaaacctgtattgcttctgattggctcagagggtgattattatcatggtagagaattatttaatcagtgtaagtaaaatttctctgtgggctgggcactgtacaaagactcaaacgaatctgtctacagatctgaaaagcagatacgagatctgtgaatggctggggtttccaagcccacagtacaagcatgggccacaccttacagcttggaggactgagccctgaaaatgggcaagttccttcacttctctgaaccttatttttcccacatttaaaacaaggatgagtagtttctgaggtcctttttacgacttctcttcctacagactctagcatcctataacttgatacaaagagggtggatatgaactcacctttcctagaaaagttccaggaaagagaataccaggtcatcctagtaggtgtgtagacaggccagatagatcttgaaacttactcagttcttcccagatgtataactctatcattgttcttagctgtcaagagaaagcaggagagcctgcatcttcattctttttttttttttttttttttttggagacggagtctcactccatcacctaggctagagtgcagtggcatgatctcagctcactgcaagctccgcctcccaggttcacgccattctcctgcctcagcctcccaagtaactgggactacaggcgcccaccaccacacctggctaattttttgtgttgttagtacagacggggtttcaccatgttagccaggatggtctcgatctcctgacctcgtgatccgcccaccttggcctctcaaagtgctgggattacaggcgtgagccaccgcacccagcctgcatcttcattcttactgttagcctcaggttcaccccacctagcttattaagtgatgttgaataaccaattcttacatattattaggctcatggacaccatgacatccagactgatgggtgcctgctgaagggggtgaccctagcaggaggactcccctacgcaaggattcatggagtttgctgtttcttttccttagggtgagaaccaaactgccttcacacggtgggcagaggggaactgactcaggtttggaataagagagaacatcccaactgaaaagctcttggaattcgctgaacttcaagacactgtgtggaccagcttaggatagggagtgagaagaaattaaccaaaaggtaatttcgttacttttcagctggaaaaaagatcagattatacttgtgctttcataattaagtagctgctggaaaaaaacgcttcagatgctttctatgagaaaactgctgcttgaagttcagcagaagttatctacttgatacttatattccaggcaaggccttccgttggagaaaatatcggcactttggacaaaactgaaatgtgaaaagaaagggaagagagggcctctatcatgtaagatgcttatccaaagtggatttggtctggaaagtcttctaaaaccttccacatgactgtggaataagtcatgtggggcgcggggataagcgaatctctcaaattccaccacgtatgccctcattcaacctggatccttagagtggcctccagggcactctgctcaggactcagtcagctgttggccacacccatgctctccagtctcctgagaccctatttggttctgagagggctaaaaagcagtgtggctaaatatcccaggcctcaaagtattcctactgtggttggggaagcaatagaatcataccccataaaacaatgaaaacagtgctagaaaaacatcgagagacagaaacatctctacgagttaggccacagttagagtgaaggcagggaaggtttttaaagctgggtggaggggacaagtcaaaaagatgtggaaactggtttccctttcctatggctaaagtgctcaaaggggaaaaaggagtttcaaaaatgttcttggaaataccatctctcacgaattcttcggcctctgctgtcccaatgtcacttgtctgagatgtaaacagaggagttctgagaaagaagctgaacttgcatttctccctgtttctatttgttccaaacttgtggcatttctaacaggatgaagcggaagagaaagggaaagagacaaaagtgtagaaagatggaagatcccagctgcaaatggccatttgcagttagatggaacagctgctgacgttcagggaaatgcatgtctctcttcagatgggaaggagcagtggaaaggggtgacgagttcctggctggccaccaatcatcccatctttctgtgccggttcctcatctggaaagtgggagtgatacttgtgcttgcttttcctacccacaaagattattgtgagagctataatacggtgagatacagaatcctgcttttaaaaatacaaagcagaatcaagatgtcaataataaggatagtaattgtgttagttatctgcaatcatctattatagctagtcgtctaggatcctggatcgttctcctggttttactacagttttggatcagctcacccccaaatcccttgctgaagggtggagctctgtcagccatgggcagggaaccacttcctcttgcctttctactttctgtctttcaaacatgcccagggtctttgcacttgctgttccccctgcctggtacctctctcctgtggcttgccccagagctgatccttgtctttgtccacttctcagcgaggatggcacttcagggagcccttcccttactatcgcagagagagcaggccctccccagtcatgtccaacccagaactctgttttgttttcttcatagccctagcatcacagaaaatcaccctgtgcattcatggatgtccacgggggcaagggctttgtgttgcttaacccagcatcctgaaccgtgtttgttgaatgaatacagaaccccgtttgctctgggagagcacagaaaacagtcttctatcatatatcatagccagctgcaaacagcagatggcttcccatatcccagagagtaagaaccagagagagagagaaagagagagagtttgggtctttctcctctgtgcctgctctctccagagaaactggaggggtagcagttagcattcccccgctggttccaccaagcacagtcaaggtctctaggacatggccacccctcacctgtggaagcggtcctgctggggtgggtgggtgttagttggttctggtttgggtcagagacacccagtggcccaggtgggcgtggggccagggcgcagacgagaaggggcacgagggctccgctccgaggacccagcggcaagcaccggtcccgggcgcgccccagcccacccactcgcgtgcccacggcggcattattccctataaggatctgaacgatccgggggcggccccgccccgttaccccttgcccccggccccgccccctttttggagggccgatgaggtaatgcggctctgccattggtctgagggggcgggccccaacagcccgaggcggggtccccgggggcccagcgctatatcactcggccgcccaggcagcggcgcagagcgggcagcaggcaggcggcgggcgctcagacggcttctcctcctcctcttgctcctccagctcctgctccttcgccgggaggccgcccgccgagtcctgcgccagcgccgaggcagcctcgctgcgccccatcccgtcccgccgggcactcggagggcagcgcgccggaggccaaggttgccccgcacggcccggcgggcgagcgagctcgggctgcagcagccccgccggcggcgcgcacggcaactttggagaggcgagcagcagccccggcagcggcggcagcagcggcaatgaccccttggctcgggctcatcgtgctcctgggcagctggagcctgggggactggggcgccgaggcgtgcacatgctcgcccagccacccccaggacgccttctgcaactccgacatcggtaagcgctcctggtgccccgcccgagccccacgctgcagccaggactgcagcgctgcttagggaggcagggcgagccccactcctttcctctgccccaggagaggggcagacggggttggggcggagtggagaaactcgatgtccttgggcgggggcgctggcatagctgagaggggaagatgccctgcagaggaaactcacagtggctgagggagcccctggccgcctttgctttcctaacttaggtcgtgaggttcctaccggtccttttgacatctggaaaatgtccccattcactactaacggaggaagggctagaagagaagggtggggaaagggttcccaaaacttggaatgctaactaaagtgctgggaaattgaatagttaaaaaaaaaaaaaaaagttgcccgccatgtgcacggaaagttgcaggagaaacttggagtactccgagtctgcatcatctcctgcgcctatgaaattcattcttttcactgagacccaacccagctgcaggcttcccaggcaagcgctaaccgagcttctgggactgccaagtttgggtggatttaagggggaaaatgaggagaaagctgtggcattgacccacgccctggaggcactgtgtttgagagtgttgatagccagcagaaggtgcgaggggtcactcaccacatagctgtgaaaattcacaggaaggctatttttttcccccttgaatgtgtgtggggagggggagaatgggtagtggaaaacagatttgtcaccaaaagaacaaacctgccaagggtcacatcacggtgacagttccagactggacttagtgtcttgagtagagagaccctgtaaagagacctcctactccttagtgtgtatggagggccccgagagcatcctgggaggcttgtctgggagtgtttgggacacttgtgtttggatggctaaaggtggagtggcatctgggaaacatctctctcctcctttccagcccataaag

SEQ ID NO: 45 - DNA, 15863 bp, Homo Sapiens
agcctcaacctcgcaggctcaagcgatcctcccacctcagcctcccaagtagctgggaccataggcccaacttttttgatagagacaggatctggctgtgttaccaaggctggtctcaaactcctgggctcaagcatcctcccaccttggtctcccaaagtgctgggattataggcatgagccaccacaccagccacaaaaatcttttgaacacaaactcactggccaggagcagtgctcacgcctgtaatcccagcactttaggaggcgcaaatgggtggatcacttgaggtcgggagtttgagaccagcctggccaacttggcgaaaccccatctctactccaaataccccaattagccgggtgcggtggtgcgtgcctgtaatcccagctactcaggaagctgaggcagcagaatcgcttgaaccgggacacagaggttgcagtgaggcaagatcacaccactgctctccagcctgggccacagagcgagactctgtctcaaaaccccccccccccaaagaaagccaaaaagaacacaaattgactatctgtattgcaagatatatcttttaaaatgtcctaatactataatcattaatatcataatcacgacctcgatgaaccactctcgagagttgaaaatttgacagtcgttatcaccgtctcagaaagcagtacaaaaaagaaagagtgctgatggaggaggagaaggcccagcagagccctgagtgcctgagtgctccagcgcagggaggtggagacagtgactcatgctgctaagagatgcagtgaggcgaatttagagaatgacccaagaggggctgggcgcggggctcatgcttgtaatcccagcactttgggaggccgaggcaggaggatcacgaggtcaggagatcgagaccatggtgaaaccccgtctctactaaaaatacaaaaaattagccaggcgtggtggcgggcgcctgtagtcccagctactcgggagaggctgaggcaggagaatggcgtgatcccgggaggcagagcttgcagtgagctgagatggcgccactgcactccagctgggtgacagagcgagactctgtctcaaaaaaaaaaaaaaaacacctctctcatgacttcccaaataaactccaaatgccttacccataagaaccaacacgacgtggctgctcttctctgtcctcacccctctgtccccctcacttgcctcagtctggctataccagcattctgggttttttgttttgtgtttgtttgtttgtttgtttgtttgtttgtttgttttgggatggagtctcactctgtcacccaggctggagtgcagtgacatgatcttggctcactgcaacctccatctcctgggttcaaatgattcttctgcttcagcctctcaagtagctgggattacaggcacccaccatcacacccagctaatttttgtatttttgtagagatgaggttttgccatgttggccaggctggtctcaaactcttgacctcaggtgatctgcccacctcagcctcccaaagtgctgggattacaggtgtgagccactgagcccagtctgttttgttgttttttgagatggagtctcactctgtcgcccaggctggagtgcagtggtacaattttgtctgactgcagcctccacctcctgagtttaagagattctcctgcctcagccacacaagtagctgggattacaggcgcgtgccaccacatgcgtctaattttggtatttttagtagcgatggggttttgccatattggccaggctggtctcgaactcctggcctcaagtgatctgcacacctcggcctcctgagtagctgggattacaggcgtgagccaccatgcagggcctttctggtcttttaacgcacaaagctatttcccagttctgggtgtttatagtatcattgccagttcctggaaagctctttccagaagccttcacatgactgatcccttatcctccttcaggtcttagctcaaatgcctccttttcagagagctccttcctgaccattttatgcaatgtgctttcctctagttagtctctcttcattctgtgtatttccttcagagcatttatcatcatcttggtcctgatgcttgctggtttacatgtttgttgtctgtctcccacacagaaagcaaaccagcccttcatctgtcttgtccaccactttatcccagcacagtgactaacatatatcagtagtcaatcaataaatagctataagccaggcacggtgactcacacctgtgatccccgcactttgggaggccaaggtgggcggatcctctgaggtcaggaatttgatatcagcctgcccaacatggcgaaaccccgtctctactaaaactataaaaattagtcgagtgtgatggcgtgcgcctgtaataccagctacttgtgaggctgaggcaggagaatcgcttgaacccgggaggcagaggttgcagtgagccgagatcacaccacagcactccagcctgggtgacagagcaagaccttgtctcaaaaaaataagaaatagaaatatatatatgctgccacaagaaattcactactttttagcaaaaaacacagattcctaattaaagaaaggggaaacctctctctaaataacttcagaattcggggcagaaaacgctacatgtggaaactcgtcttgaaaaacagtcccgtttgtgaacaggaaacacttggactacactttttccatctccacgaaggacttaaatgtgcagcattgatgaagaggcagttagccccagtccttaccatttctgcatattccacctgctccccctcatggtacagctctgggggcaggttataaattcgcaagatgttatcagcactattggtcaagatgcaggaaccgtcaggagccctagaaacaggggagagttagaaagctggccagacctatgcttttcaagtgtagggctagggctgagcctgcctctggggtaggtaagcccccctgaatccttgagggaagtagaagacacaaactgctagataaaatgtaagctcagtctaaaagggctacgtgccgcttctcccagctctggggcatccctctcctagaaaactggactgttttacagtgaaaatctcgggggtggtcagctccctgccccgttgttatccttaccacttacagcctttcaagaagttctcaggttgggtgctgaactctgaccaggaaccactgagaaatcgaggcagctgggagaagctgtagttccaagcgctgaaaggaagatgggggacaataaacctgggtcgccaagcaaagggggcagaggcctggagaagtgggtctcaggaccagaggacagatcgacctcacacttcatctccccagactccacactccactgccatcaccacttacgtgtctccctcgtcctctgcagcgggttccccagaggtatcttccatggcttttccagaccccaactctggcccgttcgcttcttcttcagaaaggctcccgtttgcttcttctgcaggaaggcttgtattttcagaaagttcttgctcctcgattcgaggactcaactcactaggggaaccaaactctgtttccaggggagtggagagagaaactgggtccccctcccgtagctcctgggacacagctgagccagccacaggatctggggacaaccggggcggatcccccctttcgggaggcggtggcatcagttcagagtccgcatttttattcatcggggaagcgtggggagaaggatgggctggagctgggtcctggtctgaaggacagcagtccggagctaacggttgagtctccaaagtcttcatactgcagaggaagcacagcggagattagcctcagccaggatggcttcgaagttctcagggatccgacgcagagctaaagaaacccacctgtgcttccctcctcttctgggagtaggcagaagactcccgggaggagaggcgaacagcggacgccaattcttttgaaagcactgtgttccttagcaccgcgggtcgctacgggcctcttgctgtcgcgggatttcggtccaccttccgattgggccgccgcatcccggatcagatttcgcgggcgacccacggaacccgcggagccgggacgtgaaaggttagaaggtttcccgttcccatcaagccctagggctcctcgtggctgctgggagttgtagtctgaacgcttctatcttggcgagaagcgcctacgctccccctaccgagtcccgcggtaattcttaaagcacctgcaccgcccccccgccgcctgcagagggcgcagcaggtcttgcacctcttctgcatctcattctccaggcttcagacctgtctccctcattcaaaaaatatttattatcgagctcttacttgctacccagcactgatataggcactcaggaatacaacaatgaataagatagtagaaaaattctatatcctcataaggcttacgtttccatgtactgaaagcaatgaacaaataaatcttatcagagtgataagggttgtgaaggagattaaataagatggtgtgatataaagtatctgggagaaaacgttagggtgtgatattacggaaagccttcctaaaaaatgacattttaactgatgagaagaaaggatccagctgagagcaaacgcaaaagctttcttccttccacccttcatatttgacacaatgcaggattcctccaaaatgatttccaccaattctgccctcacagctctggcttgcagaattttccaccccaaaatgttagtatctacggcaccaggtcggcgagaatcctgactctgcaccctcctccccaactccatttcctttgcttcctccggcaggcggattacttgcccttacttgtcatggcgactgtccagctttgtgccaggagcctcgcaggggttgatgggattggggttttcccctcccatgtgctcaagactggcgctaaaagttttgagcttctcaaaagtctagagccaccgtccagggagcaggtagctgctgggctccggggacactttgcgttcgggctgggagcgtgctttccacgacggtgacacgcttccctggattgggtaagctcctgactgaacttgatgagtcctctctgagtcacgggctctcggctccgtgtattttcagctcgggaaaatcgctggggctgggggtggggcagtggggacttagcgagtttgggggtgagtgggatggaagcttggctagagggatcatcataggagttgcattgttgggagacctgggtgtagatgatggggatgttaggaccatccgaactcaaagttgaacgcctaggcagaggagtggagctttggggaaccttgagccggcctaaagcgtacttctttgcacatccacccggtgctgggcgtagggaatccctgaaataaaagatgcacaaagcattgaggtctgagacttttggatctcgaaacattgagaactcatagctgtatattttagagcccatggcatcctagtgaaaactggggctccattccgaaatgatcatttgggggtgatccggggagcccaagctgctaaggtcccacaacttccggacctttgtccttcctggagcgatctttccaggcagcccccggctccgctagatggagaaaatccaattgaaggctgtcagtcgtggaagtgagaagtgctaaaccaggggtttgcccgccaggccgaggaggaccgtcgcaatctgagaggcccggcagccctgttattgtttggctccacatttacatttctgcctcttgcagcagcatttccggtttctttttgccggagcagctcactattcacccgatgagaggggaggagagagagagaaaatgtcctttaggccggttcctcttacttggcagagggaggctgctattctccgcctgcatttctttttctggattacttagttatggcctttgcaaaggcaggggtatttgttttgatgcaaacctcaatccctccccttctttgaatggtgtgccccaccccccgggtcgcctgcaacctaggcggacgctaccatggcgtagacagggagggaaagaagtgtgcagaaggcaagcccggaggcactttcaagaatgagcatatctcatcttcccggagaaaaaaaaaaaagaatggtacgtctgagaatgaaattttgaaagagtgcaatgatgggtcgtttgataatttgtcgggaaaaacaatctacctgttatctagctttgggctaggccattccagttccagacgcaggctgaacgtcgtgaagcggaaggggcgggcccgcaggcgtccgtgtggtcctccgtgcagccctcggcccgagccggttcttcctggtaggaggcggaactcgaattcatttctcccgctgccccatctcttagctcgcggttgtttcattccgcagtttcttcccatgcacctgccgcgtaccggccactttgtgccgtacttacgtcatctttttcctaaatcgaggtggcatttacacacagcgccagtgcacacagcaagtgcacaggaagatgagttttggcccctaaccgctccgtgatgcctaccaagtcacagacccttttcatcgtcccagaaacgtttcatcacgtctcttcccagtcgattcccgaccccacctttattttgatctccataaccattttgcctgttggagaacttcatatagaatggaatcaggatgggcgctgtggctcacgcctgcactttggctcacgcctgcactttgggaggccgaggcgggcggattacttgaggataggagttccagaccagcgtggccaacgtggtgaatccccgtctctactaaaaaatacaaaaattagctgggcgtggtgggtgcctgtaatcccagctattcgggagggtgaggcaggagaatcgcttgaacccgggaggcagaggttgcagtgagccaagatcgtgccactacactccagcctgggcgacaagaacgaaactccgtctcaaaaaaaaggggggaatcatacattatgtgctcatttttgtcgggcttctgtccttcaatgtactgtctgacattcgttcatgttgtatatatcagtattttgctccttttcatttagtatagtccatcgattgtatatccgtccttttgatggccttttgagttgtttcccatttgcggttatgaaataaagctgctataaacattcttgtacaattctttttgtgatcatatgttttcgtgtttcttggagaaatacttaggaggggaattgtggaggaagtaaaaagtagctgtattttgaactttttcagaagctctgagttttccagagcggttgtaccattttacactccaactagcaaggtatgggagttattatggttgtgccacagccttccggacattaggtatgtcagtctttctaatgtggtatatccttgtggttgtaatttacagttctctattgactaaggatgttcagcattttttcatgtgcctattggccattcgtattttgtttgtaaagtagctcttcgagtcttttacctgttattttggtttttttgtttgtttttattgttcagttgtgggactgctttatactttctggatacaagtccttatcagatccatgagtcgtgaatgttttcttctgatctgttgcgggcctatttgtttgctttacagagtttacagaatcttaagaggagtggattaatcttttttatgttcagtatttgccttgtcctgtttaggacatctttttttttttttttaaccccagggtcatgaagatataatcttacattttcttttaggacctttatggtggtaagttttacagtaaggtccttaagccattaattaattcttaaaattaattgtttatggtgtgaggtgtaggagtcagtctctggtatctttcctgtatggaaatccagttattctgtctccacttgttgaaataggcttcctttctctactgaatgcttttaattttaattattttacagttggagtatagggctaccattttagtgctattttctttttttctttgttaatttttgagacagggactcacactgttgcccaggctagagtacaatggcacaatcaaggcttactgcagcctcgaacccctgggctcaagcagtcctctagcagcctcacgagtagctgggattactccaccacacccagctaactattttatttttttgtattgacaggatctcactatgttgcccaggctggtctcaaactgctggcctcaagctttcatcccatctcggcctcccaaagtgctgggattacaggtgtgagccaccatgcctgacctcttagtgctattttctatttatctcctctgttctctgctctctttaaacgttggaggaagaaacagtacccatcttacacaaactcttcagaaaacagaggaacagactgggcgcggtggctcatacctgtaatctcagcactttggtacgctgaggcaggggatcatttgaggtcgggagttcgagaccagcctggccaacacggcgaaaccccatctctactaaaatacaaaagtagctaggcgtgcaccatacctgtaatgccagttactcaggaggctgaggcacaagaatcccttgaacctgggaagcggaggttgcagtgagccgagattgcgccactgcactccagcctgggcaacagagtgagaccctgtctcagaaaaaaaaagaaagaaagaaaaaatagaggaatatttcccaacttgttttcgaagccaggataatcctggtaccaaaaccaaacaaggacattataagaaaagaaaatatagaccaatattcctgttagcatagacatgcaacagctaaccaattttagcaaaccaaacctggtaatatagaaaaaaggataaataggccagtcgcggtggctcacgcctgtaatcccagcactttgggaggctgaggcaggcagatcacttgaggtcaggagtttgagaccagcctgaccaacatggtgaaaccccgtttctaataaaaatacaaaaatcaggctgggcacggtggctcacgcctgtaatcccagcactttgggaggccgaggtgggcagatcacgaggtcaggagttcaagaccagcctgaccaatgtggtgaaacgccatctctactaaaaatacgaaaatcagccggtgtggtggcacctgcctgtaatcccagctactcaggaggctgaggcagaattgcttgaacccgggaggcagaggttgcagtgagccaagatcgtgccactgcactccagcctgggcgacagagcaagacttcatctcaaaaaaaaaaaaaattagctgggcatggtggtgggcacctgaaatcccagctactcgggagtctgaggcaggagaatcgcttgaacccaggaggcagaagttgcactgagctgggatcacaccattgcactccagcctgggcaacagagtgagactccatctcaaaaaaagaaaaagaaaaaggataaatacattctaaccaaataatgtttatctcatgattgtagctgattcaacattcaaaaattggcctggtgcagtagctcaggcctgtaatcccaacattttaggaggctgaggcaggaagatctcttgagcccaggatttcaagaccagcctgggcaacatagtcagactggtctttactggggggaaaaaaatcagtctgtgtaattcaccacattaacaaagggaaacataaaaaccctatgatcatttcaacagatgtagcaaaagcagttaatgatatcaacacatatgcatgattacaaaccaaccaacctcctagcaaactagggaaaggaaacttaactagtttgataacagggcgtccacagtcggagttccactagcagcatacataatggtagaaaactcagtgctgctgggggcggtggctcacgcctgtaatgccagcgctttgggaggcctaggcgggcggatcacgaggtcaggagatcgagactgtcctgactagcatgctgaaaccccgtctctactaaaaatacaaaaacaaaaaattagccgggcatggtggcgggcgcctatagtgccagctactcgggaggctgaggcgagagaatggcgtgaacccgggaggcggagcttgcagagcctagatcgtgccactgcactccagcctgggtgacagagtgagacttcgtctcaaaaaaaaaaaaaaaaaaaaaagaaaagaaaactcaacgctttttcctctaagatcaggaactagaaaaggatttgactctcacaacgttgataccatactggaggttttaaccaggcaagaaaaagaaataatgagggccgggtgcggtggctcaggcctgtaatcccagcactttgggaagccgagacgggtggatcacgaggtcaggagatcgagccatcctggctaacacggtgaaaccctgtctctactaaatatacaaaaaattagccgggcgtggtggcgggcgcctgtagtcccagctactcgggaggctgaggcaggagaatggcgtgaactcagggggcggagcttgcagtgagctgagatcgagccactgcactccagcctgggcgacagagcaagactgtgtctcaaaaaaaaaaaaagaaaaagaaataatgattagtggcccgatgtctcacgccagtaatcccagcactttgggaggccgaggtgggcagatcacctgaggtctggagttggagaccagcctgacaaagatggtgaaacctcgtctctattaaaatattaaaaaaatagccaggcgttggccgggtacagtggctcatgcctgtaaccccagcactttgggaggccgaggtgggtggatcacctgaggtcaggagttcaacaccagcctggccaacatggtgaaaccccatctctactaaaaatacaaaattagccgggcgtagtggcgggcgcctgtaatcccagctacttgggaggcttaggcaggagaatcgcttgaacctgggaggcggaggttgtagtgagccgagattgcaccattgcactccagcctgggtgacaaaagcaaaaactccgtctcaaaaaaaaaagaattagccaggggtagtggtgaacgcctgtagtcccagctactcaggaggcagaggcaggagaatcacttgaaccccggaggcagaggttgcagtgagccgagattgtcccattgcactccagcctaggcgagaagagcaaaattccatgtcaaaaaaaaaaaaaaaaaaggaaagaaaaaaaataacgattagaaaggaagaaatcaaacacattcacagccagtatgattctatacataccatggtcctaatggggccaggcgtggtggctcatgctgtaatcctagcacttttaggaggctgaggcaggtggcttccctgggaccagctggccaacatggtgaaaccccaactctaataaaaatacaaaaaatcagccaggcgtggtgagggcacctctaatcccagctactcaggaggctgaggcaggagaattgcttggacctgggaggcagaggttgcagtgagccgagatcgcgctattgcactccagcctgggcaacaagagtgaaactccggcagggtgtggtcttacgcctgtaatcccagcacttcgggaggctgagccaggccgatcacctgaggtcaggagtttgagaccaacctaacatggtgaaaccccgtctctactaaaaatacaagaattagctgggtgtagtggtgggcgcctgtaatcccagctacttgggaggctgagacagaagaattgcttgaacccaggaggtggaggttgcagtgagctgagatcatgccattgcacaccacgccgggcaacagagcgagattccgtctcaaaaaaaaaaaaaagatgaaactctatctcaaaaaaaaaaaaaagtcctaatggaaaatccataaaaagctaccaaaactaataaataaatatagcagggttgcaggttacagggcaatatagttatccctctatctgtaggggcttggttctgggactcctcacacaccaaacccacagatgtctaagtcccatatataagacggaatagtatttaacctacacatatcctcccatatagtttaaattatctagattacttacattacccccatacaatgaaaatgctaatgtacatgcaagtatgtatgtaagtacttgtactatattgtttagggaatcactggacagataggccttcaagactgataccagcagccactgttaagattctggtcaggcctgcccctgtttggggtctcagttgatctcattgccttcccacccagccaagggcacctgcatttctcttggctccctggccatttggaaggcctagttcagcctggcacatttgtatcctggcccactgatgctggtacccctgggaaggtcctgctctgaaaaacacggagattttagttgctactgaagatttgagagataaagacagggagacctgtctgtagacctgtgtccctccaagtgggattgagactttgggccccccatttcaggacagcacctcctggcctgttgactgaatagatccctgaaggaggtgtagttgcattttaggagtgggggtgggagcagtaccactgatccgcactaacaatcacacagttctctctagaataataatatagaacaagtgaaatagaacaattgcagaaagagctaacctttgttgagctcttactgtgtgcccagcactttcctcaactctacatttcccataatacatagagtactaggtaggcggggcttgggggctcacgcctgtaatcccagcactttaggaggccaaggggggtggatcacctgaggtcgggagttcaagaccagcctgactaacatggtgaaaccccgtctctactagaagtacaaaattagccaggtgtggtggcacatgcttgtagtcctagctactcagcaggctgaggcaggagaatcatttgaatccgggaggaggttgcagtaagcggagatagtgccactgtactccagcctgggcaataagagctgagactccgtctcaaaataaaataaaataaaataaaataaaataaaataaaataaaaaaagaaaagagcctgccattaaaggagctgtttggtaggggatgttttgtcagtgcaaacaacagaaaagtgggctgggcacagtggttcatgcctgtaatcccagcactttgggaggccaaggcgggcggatcacctgaagttgggagttcaagaccagcctgaccaatatggagaaaccccgtctctactaaaaatacaaaattagccgggcgcagtggccgatgcctgtaatcccagctactcgggaggctgaggcaggagaatcgcttgaacctgggaggcagaggttgcggtgagccgagatcgcaccattgcactccagcctggacgagagcaaaactctgtctcaaaaaaaaaaaaaaacagaaaagtgtaacaaacacttacagtaggcatgtttcttagcaaatctgatgacaaatttggcataaagaaagagagcatccctgaaaaaaaaaaaaagaaaaagaaagagagcatcctgcctgggcaacatagtgaaaccctgcctctacaaaaaaactcaaaaattggccgggtgcagtggctcacacctgtaatcccagcactttgggagtcggaggcgggaggatcacctgaggtcaggagttcgaaaccagcctggccaacatggcaaaaccccatctctactaaaaatacaaaaaattaatcaggcgcattggtgggcgcctgtaatcccagctactcaggaagttgaggcaagaggatcgcttgatactgggaggtggaggttacagtgagtcgagatcacaccactgcactctagcctgggtgacagggcgagactccgtctccaaaaaaaaaaagaaaaagaaaaagactaaaaaattagccaggcaggcctctgtggtcccagctacttgggaggctgaggcaggagaatcactgagcccaggagtggcaggctgtagtgagccatgattgcaccactgtaccctagcttgggcttcaaagcaagaccctgcctcaaaagaaaaaagaaagaaagaaagaacatggcgggccaggcacagtggctcacacctgtaatcccagcgctttgagaggccgaggcaggtggatcacaaggtcaggagttccacaccagcctggccaacatggtgaaaccctgtctctactaaaaatacaaaaaatcagcaggcagggtggtaggggcctgtaatcccagctactcgggaggctgaggcaggagaattgcttgaaaccagaaggcagaggttgcagtgagcctagactgcaccactgcactccagcctgggcgaaaagagccaaactccatctcaaaaaacaaacaaaaaaacaaaacaaaaaaaaacatggcagcctttgaaagcttgtctgggagaaggtgcgatgatggttgcataacttcgtgcaagatgctggtccacacaggggctgccccttgctctttctcgctctcttaacctctcatataacaggcttgtgtgttatgcacatttattgagcccaagcaggtgcaaggcattgtgatctaatactttggtcagcaagacaacaagatagatcactgccctgcccttaggaagtgtatatgctattagaggaaacagataaaataaacaaggaaaagtatcagacaatgtaagtgctatgagaatgcaaatgaggtgatgtgaattaaaataggatgacttaagtctgcacggaaggcccctacccccatgttcctggctagccaaggaaccaccagttgattagcagagaagggcagcccgtctagctagagcttttggggaagagggagtggttgttaagagatgagattaaagaagccgagacgggcccttcgtgagggggggttgtaatgcagggctgaggagtgtccgaagagaatgggcaggtgagcggtgagacagttgttcttccagaagctttgcagtgaaaggaatcaaagaaatggagccgtgtatcaggtggggaagggtgggggccaagggggtgtccttccccatacagagattgcaggctgagaatgactatatccttgttaacaggaggtgggagcagggcacggtagctcacacctgtaatcttggcactttaggaggcggaggcgggccgatcacctgaagtaaggagttcgagaccagcctggccaacatgcaaagccctgtctctactaaaaatacaaaaattagctgggtgtggtggtactcgcctgtaatcccagctactcgggagactgaggcaggagaatggcttgaacccggaaggtagaggttgcagtgagctgagatcatgccactgtgctccagcctaggtgacagagagagactccatctcaaaaaaaaaaaaaaatacaggaagggagttgggaatagggtgcacatttaggaagtcttggggatttagtggtgggaaggttggaagtccctctctgattgtcttttcctcaaagaagtgcatggctggtgtggggtggggcaggagtgcttgggttgtggtgaaacattggaagagagaatgtgaagcagccattcttttcctgctccacaggaagccgagctgtctcagacactggcatggtgttgggggagggggttccttctctgcaggcccaggtgacccagggttggaagtgtctcatgctggatccccacttttcctcttgcagc

SEQ ID NO: 46 - DNA, 6077 bp, Homo Sapiens
aaaatatgagaaagcaagcacctgacattctccactccaaaagaggggggccttcggaatgctactgccctggccttcagtgactgtggccttctctcctgccagaggtttcatgtctagatcaccagtgacatccccagcccctaaagatcagttcagttcatacaagggtaatgttgaaatatacaagccaggttttaatattgctatactctattgtaaagtataaaagtatgttttaactcgctacttaaagctttaagacatttttaagtcccttcttatctgtatgttaaaaactaaacttaaatgggaagtagcattgggagaaagctcttctgtgaactaataaccaaaatcctctgctagttttataaacacttttggacaatttcctcaaatttataaagggtaagaattgaggcttcacagatgacaacgaaaatggcaaggaatgcatcaatcttcttatgcagtgccgaactcagagccaaaacaacagaagatcaaaagacaggctttcacttctgcacacataaagatgcttcgcaaatgctcatttatctccattaacctattcctaacacgaaacgggaaatgtttaagtgttagtactattttcttaaagatagtttcttcttgtccatatttgttcattatgtccctatccaagcaaacaatttcaagtaaaaataacgcctgagtactcacctgctgaatgtatattttactacagtttcaagatcaagaactgatgtttaaatattaactgcttcgttagttttacttatcaaggtcaaagtagtttgtgttttatgaaccgatatcaaaaaagaaagccacgttagttttccgtgggagaaaagagagacaggcgggtgacggcagattggaacaaggagctaccacagcacttactttctcacactgtagctttgaaaactgtgatcagttacagtgaattccttatgaaatggaatatttttaccaacaccttgaggaaccacataaactctactgcaagatatgaaaactagaaacatggacctgctctccccagtcctcagggctttcaagaagatgattccagtaacagatcattaccaagtgtttcagggtattttgaccagagtgtacaagctggaaaaaaacacccaagttaagcaagcagatgtaatctttctccttataattcactgaaattttcataaatggtaaaaacaaaaaacaaacctctcatttaattgaggaggggggcacattgaaaatataccaaggctgagatgccatttaaactaatgaggttttctgttttgtagctgatgctattttatgtgatttggaataaaacctccctgaagaggtaaaaaacgtaatttgagagttaaactctcaaaagctagacagagcacaggaatgtcaggagtggcaaaacctgaaaaagcatcatgatacatcagtcagttagtacaggtggtggataaggaaaacgaagcccactttttacgaggcatgtttcttcttagtggctttccaatgccaattgtccccctcttctgaggacatacatactaggcatccgggttatccctctcttctgaggatatacactactaggcatccaggtacatacactatatgttttgaagcttaaagttatagctctgtgatttaagcacccttctgccacccatggaacgaagacctcaaatcccagccatgaggacaactacttccttacctggggatagaatactagtatttaaatcatttattcggcatgtggtagaggagaagagaattagaggagaagtagagatgacaaagtagccacaccacttaccagtttacaggcaacagaatcatcaatttgccttttgtgacaaagtaacaacaaagagccgacatctcctataccctcacctgtgtgcagtcggcactgccgatacccacctttccaagggcacctccccagaccccccacctgtctacggtatcttcctgggtcccgcacctgcccgggcacctgccggggtcctgcacctgtccggcccccatatctgcttggggtacctgcctgggccccgcacctgcttggggtacctgcctgggccccgcacctgcttggggcacctccccgggccctccacctgtctagggtatcttcctgggtcccgcacctgtctggggcacttgctcagacactgcacctgccccgggtacctgcccgggccccgcacctgtccgggcaccgcacctgcaggatccccaagctgcctccacccacgcggccgcccccggccctgcccgccggggacgctggcaccgaggatgtcctgcccgtggcccaggtccccgccgctcaccaggtacttgccgtccggggagaacttgcagagtaagctggagagcttgaatacctcggagaagttcatggccgccgcctgccgcgggcgccaccctgcgcccgaaaacccgcgggacccctgggcgcgcagcaggctgcaacagccgacgccggcctccgaggccggaagtcagaaggcggaagtgaactgcagcctatcagcgccgccggcttccgcgcggcattgtggggcttgtagttcttgtgccgcagggctttaaaggaaacgcccacgtttcttccgaccagggatttccgacccgagaaccttacctcaaaggccgggaggcctttgagcacctccagctagggctgctgataaaaatgtagaaagcacagtaaaatttgaatttcagattcacaacaaatctagttataagtatgttcccaaatattgcacgggacatgctaatacggaaaaattactcgctagtctgaaattcaaatttaattgagcgacctgtgtgtctgcgtgtgtgtacacatgcatatatatatatttatatttatatgtaaatgtatgtttacatgtaaatatatgtttacctacaaatatatctttaataagtaatacggtgtctgtcgcacatatattatatcgtgtatgtaatgtataagtatttatttcgtttgcttggggttttgtttgcttttgctgagtccgacccctctacctgccgcctggcccttgcctcacgctccagtgccactgagatcaaggagagaacgaatttgccgctgactgggcagagcgagcgcgtggatcgcggccaccgcccgttcatcacccgcgcgcatctgggctggcaccgggcgaagaatcgtgcgggtctgggacctgggggcccagagggagcgagctcctgcgcgggcgctcggtccgcaggtttcgcaggctcaggggcgtgcctcgttctcacccccactccggaccccggtcctcttccctagacagcggccccctccacccctggctcccgcaggccgctagtagtccgcgccaggccccgccggcgcctctagggccccccagatcgcgcagaccctgacatccccgcctggccctgggttctgggagctgagagccggccagggtcctgctcgtacctccgggcgcccagcctcgggtctgctccccgcggacgccccaacctccccggccgaatggatggtggtgcgcgcgcgtcctactccggcggtgccggccttttctgttgccaaaactagacccaaacctctgcatgggattcgtctttgggtccccaccccgtgcgcccagcaaacagtgggtgagccatgaagatgtgcgagtcagccggaccctccccgtcaggcgcggacccgctgcggccagagaacccagtctgcgccagcccggctcgctcgcgaagccacgggcttcactgacgcgactttccaagacgtgggggtcaccatgggcagaggacatcggttcggagccagatcacgggccccataagcatcagaccataagcagcgccgccactgagagccgctcggaactcgcccagcatgtcgggtcccctagccagggcctggtgtacgtggtcgagggccctggaagccccgatggcctaggaggagcaggcgggcggggcggcgggtgtcgctggccggtagagagcttcggcctgacctagcgcaggtctggtgcgcgcagagaacaactccaagcgcaccgacgcccgcgagctccttccaaacaccgaacgggatccagagcccgagcccacaggcggcggccgggggagggagcagggtgctggccgccgcccgggagtgttcgcgtcctgggtgacccctggaaggacgtggggcccaaactccggctggggttgggagagcagcccccagaggctctccgcgggatcctctgccgggcgggaccgtggctccacaggagaagtgggtggcaagccctgcttggcggaaagcagccgttcccctcctcctgggcctggggcggcgcccctcacccctgttccccgcccctcacccctgttccccgccggccacatcccctgccccttggattccaagcgccccgcgcgccgaggagcccagcgctagtggcggcggccaggagagacccgggtgtcaggaaagatgggccgtctgggggacagcagggagtccgggggaaacgcaggcgtcgggcacagagtcggcaccggcgtccccagctctgccgaagatcgcggtcgggtctggcccgcgggaggggccctggcgccggacctgcttcggccctgcgtgggcggcctcgccgggctctgcaggagcgacgcgcgccaaaaggcggcgggaaggaggcggggcagagcgcgcccgggaccccgacttggacgcggccagctggagaggcggagcgccgggaggagaccttggccccgccgcgactcggtggcccgcgctgccttcccgcgcgccgggctaaaaaggcgctaacgcccgcggccgcctactccccgcggcgcctcccctccccgcgcccatataacccgcctaggggccgggcagcccgccctgcctccccgcccgcgcacccgcccggaggctcgcgcgcccgcgaaggggacgcagcgaaaccggggcccgcgccaggccagccgggacggacgccgatgcccggggctgcgacggctgcaggtaggaggcccagggccggggggcggttcggctccgcgggcgggggctggagcgcagcgctgggcaggcacctgggctcgcagctccgaagctgggaggtgaggggagagcgatcggggacgagctgggacaaggcgacacaggggctccctcggagttggatcggcccctgggacttggcgctcgcgagaggctggagcggccagagtctagcctgcgaggagacgcgggtcctgccctcagcgccggccgcctttggcgccaaagacagccccgcaggggttccgggagggccctcctcctgctgtcccctctccaccccgggctccgagggccgttgggagggtaaccccgggaagaggccggggtgcggggcgcgggtgcaggtggaaatcgccagcaagctcctccccgcccgcgcgctccctccgacctgcagggctgtgccaatcccgaggcctcagcttccctgaggagccagggccaggcccccctctggacagggagaaggatctgggcgggggccttgacccatggagttggttactaagcggtttcgatggtttcccgagggacagctccctgtggctctgagtttgtctgtcgagggctcctggcctgtctccggagcggtcccaggtagagaaagcccgtgaagaaatggcccgggccggcctggagggagacacctcacgcccccttagctcctgggccgcctcctcctgcagcccctgcctttcccggggcttggacttggggagcgatgattacctttgctcagcttgtattttggcctggacgctaggagataagcccatgtagtatgcacacgtctgctacataaacaggggacagatagacgatcttcaaccagcaagggtgcagggaaaagcaatgcaccccaaacttctgaccagaggtcatttgcttccaaagatgctgccatctgtttattcactgtctggacatttggaaatggctcaggctcattaacacaatg

SEQ ID NO: 47 - DNA, 2501 bp, Homo Sapiens
agctgggactacaggtgcacgccactatgcctggctaattctttcattttttatagagacaggacctcgctatgttgcccaggctggttccaactcctgaactcaagtgatccacctgccttgggctcccaaaatctcgggattacaggcgtatagtgctaggccttcacattcttatatacccttctgtttccttagctgtgaaatggagataatgacatagccttaattcacgtgggatgcttagcacagtgtctggcacttgatagatttttttctttctacttgaaatttatttttgagctgggcacggtggctcacacctgtaatcccagcacttgggaaaaccaaggcaggcagattacctgaggtgaggagttcaagaccagcctggcaaacatggtgaaaccccgtctctactaaaagtacaaaaattacctgggtgtggtggcacacacctgtaatcccagctactccagaggctgaggcacgataatcacttgaactcggcagatggaggttgcagctgagctgagactgagccactgcactccagcctgggtgataaagcgagactgtctaaaaaaaaattatttttaacctaatataaaactctctgaacccttctttttctgagctgcttctccacttgagtccatcccacatcattgaacagttaatcacagaattgtgtaccatcttccttgacccccagatctttagccttctatagtaccctgtctctttttgtcgtactagtcacagttgcactttttttttttttttttttgagacagagtctcattctgtcacccaggctgcagtgcagtagcacaatctcagctcactgcaacctccgcctcccgggttcaagcaattctcctgcctcagcctcctaagtagctgggattacatgcgcgcaccaccacgccaggctaatttttgtatttttagtagagacgaggtttcaccatgttgtcaggctggtctagaactcctgaccttgtgatcagcccacttcagcctcccaaagtactgggattacaggcatgagccactgcacccggccatagttgctattttatttgtgtgattgattaccgtatgacgcttttattgaagtgcagtgaaggcaggaaacatgaccggtttttacaatattttcaacacttatcaccataggtggtacatagtagggccttaataaatatttgtaaaatgaacaaagttaatgagtgtttatgtttgtagttttaattgctctgaagtaaatatctgattttccaatttccaccagagtgctctgcacatagtaggtctaattatttttccctctttactaatcacccatgccttgtaagaattcagttagttgactttttgtactttataagcgtgatgattgggtgttcccgtgtgagatgcgccaccctcgaaccttgttacgacgtcggcacattgcgcgtctgacatgaagaaaaaaaaaattcagttagtccaccaggcacagtggctaaggcctgtaatccctgcactttgagaggccaaggcaggaggatcacttgaacccaggagttcgagaccagcctaggcaacatagcgagactccgtttcaaacaacaaataaaaataattagtcgggcatggtggtgcgcgcctacagtaccaactactcgggaggctgaggcgagacgatcgcttgagccagggaggtcaaggctgcagtgagccaagctcgcgccactgcactccagcccgggcgacagagtgagaccctgtctcaaaaaaaaaaaaaacaccaaaccttagaggggcgaaaaaaaattttatagtggaaatacagtaacgagttggcctagcctcgcctccgttacaacggcctacggtgctggaggatccttctgcgcacgcgcacagcctccggccggctatttccgcgagcgcgttccatcctctaccgagcgcgcgcgaagactacggaggtcgactcgggagcgcgcacgcagctccgccccgcgtccgacccgcggatcccgcggcgtccggcccgggtggtctggatcgcggagggaatgccccggagggcggagaactgggacgaggccgaggtaggcgcggaggaggcaggcgtcgaagagtacggccctgaagaagacggcggggaggagtcgggcgccgaggagtccggcccggaagagtccggcccggaggaactgggcgccgaggaggagatggaggccgggcggccgcggcccgtgctgcgctcggtgaactcgcgcgagccctcccaggtcatcttctgcaatcgcagtccgcgcgtcgtgctgcccgtatggctcaacttcgacggcgagccgcagccctacccaacgctgccgcctggcacgggccgccgcatccacagctaccgaggtacgggcccggcgcttaggcccgacccagcagggacgatagcacggtctgaagcccctctaccgccccggggtccattttgcagacgg

SEQ ID NO: 48 - DNA, 2401 bp, Homo Sapiens
tcatcaaagaaaaaaaagatgacttactagacagttgttaaggcactcacataaaactacacgatagcaggatagatggtaaccaagagggaactcaggacccgtcactaccagctggaaacacctgacctccagcctgcaaatgtgacaagctagaccaacaccagcaggacactgaacacagcttgcagggatgagtctctgcgtcatttctggacatgtgtccaagtaaccagaacaactcaaaatgccaccaggcccttgctgtcattcccataaacctcgaacagtgagttgggtcttcaaggaacctgtctctgtcagcttaccttatgctgcataacaaacaggcccaaagctcttggcagcgtacatcaagcatggaggatctctcactcaccacgacagtcccttcgctggagggctggggttgtactccattttctcttttggaaggggcggcccctgtctgaggtctcatttgtctcacagcagagggatgaaacggcaggaccctggctttgacgggctccatttggcaatggtacatgccaagtgggtcacgtttcactgcccagagcaagttacatggccacgtctgatattgacgtgcgggaaatgcagaatcttcctgcatttggggaggcagatatttggacaacatgcaattcattacagggccagctggatgaagaacggccaagggcccaggctcttcaccccgagccaggccgaaccagccggggccgtgagatcaagccacggtcatcagtgttcgtttggaattatgccttgtccttgccgtgtccacattgtagtagggtttctgttttttaattcatctgaaattggtggtgggtgtggtacacagatgagaaacaggaactctccacgctgggctttaacaggagctgcggtgggaacacaaatggtgcagccactttggaagatagtttggtggctccttacaaaactaaatgtacccttcacatatgatccgccacacaccatccagcaattgtaccccttggtatttgcccagatgagtcaaaaacttgcatccacacaaaaacttgcacgtggatgttgatagcagctttattcataattgcccaaacctggaagccttcaggaggtgagtgggtaaacaaactgtggtgcctccggtcagcggaatattattcagtgctaaaaagaaatgagctcaagtcatggaaagacatgaaagaaccttaagtattattaagtcaaagaagccaatctgaaaaggctgatgctgtatgagttcacatctatgacattatagaaaaggcaaaactacaaagacagtaaaaggatcagtggttgcaggagctagggaggagggagggatgaataggtggggcacagaggatttttagggcagtgaaactaccttgtatgatactgtaatggtggacacaggacagtaagcatttgtcctttatcccgtagaatgtacggcactgagaacggaccctcctgtaacatatggactttcagttataatattgaatccctttcggggttccgtaccgcccgcagcgccctttaactcccgcccccgccccgctcaccgcccccttcccctgctacagcgcgctcgccccgcggccgccaatcagccgcgcgccccggccgcgcgccccgccccgcccccggtgggtgtgcgcgcggccaatgggcggtgcgcgggggccgggccgcggcggggcggggcagcggggcggccgccaatcgccgtggtgttgttgaaactgaaaatactacattatgctaatcgcggccgggcccgcgcgcacgggggtggggcccgcgcgtataaagggggcgcaggcgggctgggcgttccacaggccaagtgcgctgtgctcgaggggtgccggccaggcctgagcgagcgagctagccagcaggcatcgagggggcgcggctgccgtccggacgagacaggcgaacccgacgcagaagagtccaccaccggacagccaggtagccgccgcgtccctcgcacacgcagagtcgggcggcgcggggtctcccttgcgcccggcctccgccctctcctcctctcctttccccttcttctcgctgtcctctcctctctcgctgcccgcgtttgcgcagccccgggccatgtccgacgcgtccctccgcagcacatccacgatggagcgtcttgtcgcccgtgggaccttcccagtactagtgcgcaccagcgcctgccgcagcctcttcgggccggtggaccacgaggagctgagccgcgagctgcaggcccgcctggccgagctgaacgccgaggaccagaaccgctgggattacgacttccagcaggacatgccgctgcggggccctggacgcctgcagtggaccgaagtgg

SEQ ID NO: 49 - DNA, 1508 bp, Homo Sapiens
attctacaattataaacatttagtgtattttgcaaatatggcataacctgttggcataaaattccattgttccagaaaatatcggtaataaaattatagaaaagttaaagatcttcatttcttatttcgaagcgtttgggagacatttcagaaacggatgggaaatgttaaattctgcatgcctgcttatttttctttccacaccgactagatgtaaacgagtgtcaccaaaagtacaccacaggcacccacacagattccttccataagggatccacaaagtttagatgtgaaatgtaccctaaagggttcctagccgtctctcatccctccctctgtgaaacagggaagacacatgtgttttcaagggcagagatggaacttgggccaatgggccggggggtggggggaagttggaagggactgccttaggacatggcaggatagtggattgtttctgccgccttgttgcccataccggggctctctgcaggcgcgtcggctccctccccccctgctgagaagaagccctgccaaaacatccgcctcccccgggaacccccccgtgggttcaaagcgggaaaatgttgcctcaggtttaaaataatctgtccaagccccccagcgcgggagaaacgttcttactcgctctctgcccccgggggtgctccccgccctctgctgccagaaccttggggagtgcctagacccggggcagcacacgtccgggccaaccgcgagcagaacaaacctttggtgggcggccaggaagctccctcccagccaccgcccccctccagtgcctttttttccccccatacaatacaagatcttccttcctcagttcccttaaagcacagcccaaggaaacctcctcacagttttcatccagccacgggccagcatgtctgggggcaaatacgtagactcggaggtaggcatccgtgggggggcgccggctcgggcgtgcggggaagtgtccgcttctgctatctgcctctccaaatatcccgactgctgatctggccccccagccctctttccacttcggagcactcctctggcgttggcaccgctgaagaatgggcctgggcggggaggtgaagagaagccaggaatgttttatgttttcctaatggagagggggcctcgggagcccctgagctaggaggacacggaaaaggggattggggtcctgagattgggtctgttgggcccaagacgcgttttctggatgggtctaggatgctcccctgtcgcgggaaccccgcggtccggccctgcctgctgggggttcgaaaaagtggattgcagggtggaaggtgttatttacccgagtcctggggacagtccccgggactctccgccaagcgcccaaaacggcaggtccccaagcggcgcgcggtgtttttgcactttccaaaattcttgaaacatctcaaaaatccttctgcatcttggcgtctggcagggttttccaaaaaaagtaaacctccctcccaaatgca

SEQ ID NO: 50 - DNA, 1984 bp, Homo Sapiens
  unsure (9, 17, 18, 33, 41, 49, 50, 52, 54, 62, 80, 84, 127, 157, 159): unknown base
  unsure (175, 207..209, 214, 1181): unknown base
agcttcagncatcactnncatctttatcaatgnccttgggnccacaggnngngnccttctgnccaaacagcagccaatgnaggnatcttaaaaggcacatcactttatatttattcagtggttatgncatcacttaatcctcaccacaaccttgtgngntcagtacaatttgtgntttcattttatctgtgaacaaatggaggcagnnntttgngtaatttacaagtaagtggcagatccgggggctgtgcctagacaatgtggctccagactccttgcccctccctgccttctgctgcatcttgattgagtctagccatctatttctttaacacacactaattgctgtctccatgttccaggccctgtgccagatgctagaaatacatccccatccactggatcttggcatggtccattgctcagtgtcctgctatgttacgtgttacataatgcatttattccggtatttagcccatggaaaataatgctgaaagacattgtatgcatgtttctacaacaaaactatgtaacttatgtttcttttattgctttggctatcaggaagctcttatccaaatcagagcaaatacattagaatttgggcttgtcatttcagtttgctgaacttttccttctggcccagattttctattttggttcataaattctattgcacaaatgtcctttattgtaaaacaccttaaattctttctaagggaaggctgcatggaaatgatacagtaaggtcttccctgcattttcttagattcctattagggaaggcagacctagatgtccctcttaccctcagtcccaaagccccccatttataaaatcccttaagcagtgactactgctgttctgagtacctggaggtagttcagagcttctgaaaggtaaaatccatatacaaaaagaagttccttccgatccagatcccagctttggtgccagatgcacatttgaggagtaggtggctagtcagactctcacctgagcagttaataaaatctattgccccttaatggaattttttctgcaagctcgaattgatctgtcatctttgtgatttgtgagatggcagggaagcaccaaacaccatcatgacttgggccacagtggtgggaaaaaaggaaaaaagaaaaaaaaaatccactgccaagccttgccaggcgtanaaagggctggaactgctggggccattttatctgatttattggaaatagagtggatcttattaacattttaataaagagaatctttttgcactaggctggaagtggccgccagtcccccgtgcaattccattctctggaaaagtggaatcagctggcattgcccagcgtgatttgtgaggctgagccccaacagtccaaagaagcaaatgggatgccacctccgcggggctcgctcctcgcgaggtgctcaccccgtatctgccatgcaaaacgagggagcgttaggaaggaatccgtcttgtaaagccattggtcctggtcatcagcctctacccaatgctttcgtgatgctgctgctgatctatttgggaagttggctggctggcgaggcagagcctctcctcaaagcctggctcccacggaaaatatgctcagtgcagccgcgtgcatgaatgaaaacgccgccgggcgcttctagtcggacaaaatgcagccgagaactccgctcgttctgtgcgttctcctgtcccaggtagggaagaggggctgccgggcgcgctctgcgccccgtttctgcattcggatcgcccggcacgggcagggtgagggggctttcggggggtcggggcctccggtcgcggcggcgaagacagatcggggctcggtagggaggtcattccgagcccagagatcctaggcaccccccacacacaggctcccactctggcgtgcgtgcgtgtgtgtgtgtgtgtgtgtgtgtgtgtgtgtgtgtgtgtgtgtgtgtacgttcgttaacgggagga

SEQ ID NO: 51 - DNA, 17897 bp, Homo Sapiens
acattgcacaactcttcatttatgttcaaagtaaaggatttattacacatcctgaacatagcctacccttcaccctcatttggaattgttttcctttcatggttttttttttttttaattttcattgctcacaacatgatattacaggccaggcatgcttgcagataactgggataatttacttttacttaagtaaaaatcccagatggcagtccctccacctgggatcatgaagcaggtaggatccccttttccctcctaacagagtccaagcagtaagaccgaataagatgggatgaattcaaagagaaacatctgcatttgctcagttcttcaaccaatatttactgaacttctctacggtcaggtgtgcaagatgccaggagggatgagacaagatgatgatgatgatgatgatgatgatgatgatggtgatgatgacagtgaggatgagggtgaacactttaatgagagccttctatatgccagggactgttctaggcactttacatatattaacacatatatttatcacaatgaccctgtattgttatgtgtatcttatacatgaggaggcagaggaaggaaatgaaataacttgcccaagagcatagagtctgcaagtggcaaagataagatagaaataattctccaagagcagagagtggtgacttctggggatagggaagtggaaaagtggggagacaaaggctgttgtttttcctaacaagttttgaagacttatttgaccaggttcaagaaaaacttgataatcactacaaagtaaaaggaagaggagatgaggtgggcctttgggtacagatgcttgttttggaaagtttagggaggaaggggtgagaggaactgggctgcagtacaggaatgggggacttgggaatcagaggggattggttagggtgggtcattgattgcagtgaatgtttacttgttgattgggctgcagtacaggagtggggggcttggaattaagaggggattggtttagggtgggtcattgattgcagtgaatatttacttgttgattagtttgatccagaagaaagggagagatggatgctggaggagagagggggtcccgagggagcccaggactggaggtgggaagacacttttacggacactttttcattttgacagacagaaaagatgatggtctgcagcagtagacccataaattgtgattgaaaggtctgatggtttctctcactcgtttcctccatgcacagagaggtggagtaatttgccccaggtactacagctcataagtggtgaagttggagctgggggccacagaccaccgggttcttctccatgaatccctgctgcatcttggtctctcccaaccccgagtacccatgagttttaagaaagacagttgggaacaggtgattcctatggtcatttttggaacatttggttagaatattctagtataaaatctaagttgttgttaagtagaaatttccagtggacattagtccagaaaatccaatctcatcctgtgacggatttgcagcgcgtgtgcatttactaagcaaatctgattctactgctgaccagcgagaaagaggaataatgtaaacagtcagtgcaattgcacccacattcagctccgtgagcttctgccacctcagctggctgcggtgggggatgtggaggtgcatgcagctcccaggtcccagtgaggggcctctgtatagggtgggcgtcctctatgctttatgtgcatccaggcctgtactaaagacagtctttctcctgcagcgtgacacttagctaagaaaactacttcatctggtgctcagcggaagaaaacatccttttcaacagggaaggaaaattggctgtgttgggctgagggaggggagtgtggaatccaaatggtgtcttcctcaggccttctccaaggtgatgtggactctgattttagaatgccatcacttggaaaattgtgttccattgctcaaattcttgcctcccttctctgctcttttctcttcactccactctccttcctctgtcttctgacctattcaatgctaatggtcttccagaaggttaggcttcccacacaagcccagcctcctgccaggcaacctcctcggggtttcaagctgcaaatctgggctgctcttcgcattctgtcctgaggacctcctcaaagagacaggcaagggcctcccctggcaaaatgcccttctaattccatgcactagttccatttgttactgaagaagtgggccgccttccctgcgcctttgaacttgacattccttatcttgacactccgcacttttgaacttgacactcttgtatctttagcaggtaaaaaaccaaaggtgctcactcaataaatcgccgcaatggggagcctatgggaaaatgggtatgtgtaagctggctaaaggataacaggcacacaggctgcttgatctgggagggtctttagacagcaggatggctcccagagatgcacttttgttgttgctgttgttcatgatcatgtccccagggtctagaatggtgcctgggcatagtaggtccttaatatagttagggaatgaatgagttcatctcaaccacgctgtatggatggagaaactgcgtcttggggctgtaccatgctatgcacctgtagaaaatgtttttgccttttcagtcctttcccagtggcggagtacaggacccagctcataagagcagctcaattctgtcatttgtggaatgacagaataaataagtttcagggcctagggaggcaaggctcctgccttagcctcccaagtagctggaactacagctgcatgccactaagcccacctgattttttattttcttgtagagatgatgtctcattatgttgctcagacttttctggaactcctgggctcaagcaatcctcccacctctgcctctgaagtagctgggactacaggtacttgccaccaggcctggctagctttcatcttttttgtagagatgggacatcactatgttgtgaaggctggtctcaaactcctggactcaagagaggcttctgcattggcctcccaaagtgctgggattacaggtgtaagccactctacctggacacaacattttatttgaaataagaaaaattttccctcactgggaatgctgcagttgaactagttcaaatccataaagaatggaagactgcccagtggtcattcattcacttattaattctagatgttaaattttctagggtgggggaatgtgctcctacattcaaggcattcttgaatgtagccaaactttgtagtttagccaaacttcatagctaatagccaaactttgtagtttagccaaactcttctagcagcaaaacccatgacactggaactctgttcttcacactggtcatttgtaatagaataacagagctttagcactagataggttctgaaagatcattgaatctaatcctctccctttgccagtgagaattctgaagcccagatttgttgatttgtgatcgatagtgtcaaagacaggcctgaaacacagatgtcctgggtcctagaggtgctgtttgcccctctccatatttcttttgttccagaaaacccttctccaaaactggccctaataatcagaggggaaagccatggcccctgccttggggacagcatgggttggcacagaaaagaggtttacaattcagcaggaagtgttgtgcgtgcgcgcgtgtgtgtctgtggaggcgcagggagggtcacctgagcttgccctgggtctggtcctgggctcagtggcaaattcaacgctgggcaggtggcctgaggacaatgacggtgccagctgtgagtcagacttcctttattcataaaatcatgttcctccatgcagtgcttctcaacctggctgcacgtcaggagccacctgggtagctttgtaaaaaccccaatgcccagttggtttgcaccccctgagattctgattaaactgttctggagtccatctctctctttttattatctatctatttatttattttttaatttggcggctcctctgggacttctcatatgcagtaggggttgagaattgctggtttctttggccagatgggaacatgcaggccaatagttacgcacaaacagagcagcagagcaggacggtgctaaggttggaaagggtgagtcatgaaagttcaggaaatcagaataggaaggggtgagaatcctctcatctgggcttgtggggcaggagagaagagcccagtgggcaaggtccagtgagtgtgcttagaactgggaagatgaggggaagggtaagcgctgggcggcggtgggcaagatggacgagattaaacgggagcgaggatttcagcgagagctttggcgacacggaaggctgagaatcggagggagcctgtcgggcgaaagcgaaggcggctgctgggcaggcagccgaatccggctggagagccgagctggtgagacctacaggaagtgaagggagtcgctcagggcgtggcgcaacgagactcttagaagaaactctgaggcagagatggggggcctccgcccatacggagacacaaggaagtccacatgcacacgcacgagcgcgcacatgaacacgcacaagcacacaaacgcctcctccgggcagggcacacgcgcccgctgcacaggccgaggccctggactcggaggggactgcagagccgacccacaacccgggccccgatgcccctcccggccgcgcccctacgactgcttgcgcaacaggcggcggctccagtgggcgcccgccgcgcgctgccggagcccagcccagcccggcgcgcccgggaggagggagcagggagcggggaaggggtgtgtcccggctgcgtgctgggactgcgagggtctgggaggggcgaggcgcgggggcggggccgcggcgcctataaagtcgccctccgcccggacgtaaacaaacctcgcctggctcccagctggtgctgaagctcgtcagttcaccatccgccctcggcttccgcggggcgctgggccgccagcctcggcaccgtcctttcctttctccctcgcgttaggtaagcccgcgccctcttctcccaggcgcgacgcggagcagaaaggggccgcccgtgcggtgccgctggagcgccaggaccgccctttgtagccccgcgtactccaggagtaagcgccccggagctgcaagtgcgcggtcaccccggggcgcgggcgcgagggggctttgggtgcagacaccgctgaagtggggggttcaattacggaaagggaggaaaaaaagacagggtcccattcatctcccccctagctggggattggggttctggaggtcgggaagggggcgatgagacggtccgaaaaaataccaggatagcgtttcctggcgtcgtctccgaatcccagctggcgccgctggcaggggtgcgcgctggacgtgggtgcagaagggactaggtgagtgtgtgtgtgtgtgtgtgtgtgtgtgtgtgtgtgtgtctgtgtctgggaacggagagattgcgcgcgagtgtgtagatgaggggttggtagaggtgagtggcgctggcaaggaggctggagaggggggcgtgggtgtgtctggcttgcagactgggtcgggaacgggtgtggatccgagaggctggtggcgcttcagtcccgtagcacacacagggcggtgtgcatgtgtgagtgtaagcgtgtgtgtggggggagggtccagggtgtgtcacagtgcaacacgcgagccggagcaagtgtctgcgagcgccactgggcagggtgcgcccccggaggaacccgggattggcgcatcggcggcgtgggagaagtgacctgggcgagaggggtctcgcggacatttggcggccccttgagctggctggagctaggagtggcgtcattttcgcctccgcccaccctcccccgctttcctcccctcccctgcctctggtgctggccgctcctgccctccacgggggaaaacagctggaattacttcgacgttcctgggggatccgccgcggtctctgattcagcctcgggaggagatttcgggctgggcttggggaatgcggctggttctgggggaaacacgctgtcacgcctctgtcaaattagtagctggagctgggatttagtgggtcggttccttacccacccctcccccatatcccccgcctgttgtccctgctgtccctgggggtcctgaacagcacgcctctgtggcttggaagtgggagatgcctggcagtgggtgggggaggcagggcccttggttatcttatgcccatccaagaacaccccttcctcacggacgctgggggcacttcagtttgtttggtttctttaagctactgggaaatatctaatattcagaagtcagccagtggccaggcaggagggcggtagacatccttataatacccatcagctgcacgggaccttctcctaagctgcctcaaaagaacatatctaaatacaaaccccctgttcttgctgcagaaatgtagtttcaaggcgaatttttcagtctagactcttcctgttgagaaattctggcgttcttattgagtttcacaaatgtgattgaaataagcaaggtacagagggggcaaaccccagcgcctttcttggaagggctgccttctggtggggaagacacacggctggagacgcagaccggttctgtgtggtgtgtgtggcggcagagccagccccaggctggggtggcacagtgtcggggatgaaggaaggtgtaagggagagagagggttttggtgtggatggaaaactgggtgttcccctgacctgtgacttcttagctttgtgggaccgtgtctcccactgcatctgggcaaggaggaggatttgcctgccctgccctgtaacctggcccctggcccagcgcctggcaggtgggaggagttgaaatatgcacatgggatgaagtggatggctctgggtcttctgccccattctcctgtgaaccagcaggttgagtttcgggcgaggtaatagactgtgcatgggtggaggtgttggcttttgcttttgagggatcctggagtgtctgtttgggtctcttgtgaggaagttcttttggagcaacaaagtttgatcatttggaatggaataaaaaactcacacaggacctacctagtccaacttctttccattttacagatggaaaatgaggcacagggatggggagggatgtgcccaggccgaactgagctggagctcagctttgtgagaggctcctgggtgggactgaaggcagtggaaagggttcctggcaggattttgcctgcctgctatggaggggcgaaaggaaattgcatcttcattgaatttctggtgaggaaacttttgaggccaaaggggcagagcggaatgattttttttaagtgtaaatcaggtgttcttgagagattagcaaagccagcctgaagggcaggggcttagaggctgcagccccctgagttggcctttgactgaatggggctgccccccccccatgacagaagacagatctcaactgagctgagggcccccctgggttacgttgaaatccgctggcctgaacttgcctcctcatggacctgaaagaaagatagcattgtgtttttcgggtggcccaaagctgcagttcttccttgggacccaaccccagagaatcccattccagatgtgactcagaggccttgtcctgggagagaaagcgtgatgactcagcatctgagactcaagcagggttcaggtttgactcagcctggaaggaaggccagggagggacacgacatctctctccctccagagcagccactgtctccctccatctgccttcatcctcgcaagaacgttgcctggatcgtattgctccattgaatggatgaggcaactgaggccaggagagtttcaggatttgcctgttgccatatggctcaggtgggagagccagactttgaacccggacagttggacttcagagcctttgttttttttccatgacaacatgttggggcgcctgaagaaatcaggctcaaatgaaaaggcagtcaggagctccatgcctcagtttgcttttctgtaaaatgagagtaacagacatgatgccatcagaatgtgtaaatattaatctgtgtaacctgagaacagcactgagcatgtggaaaacagcgtgtaggtgtttgccgtcagtagcacccgcagaagacattctcaaggcatcttcttggcaggcagagtctgggaccctttgtcctaaacctacccaaggctgtgaaagtgcctgcaaatgcttgacctaggtattgctttttgctaagcttatgtaggttgcataatagtgtcatgaaaatcttgtctgaaatgcacatttccaggcccggtctcctgcgattctctctccatcaggggatatgctgttgtttcaaagctcctttggctgggttgggaatggggtatcctgcaggcagacagagttgagaacctctgctctggaatgacaggggagagaagaaggaaggtgtagtcatacatgccgctgtaccttcaggccaccctgtgtccacagtgccagggaattagtgagtgctcagtaaatagctcttgtttgctatagtgccttggaggttcaatgcatcacatcagctaactgaggtagaagacattctttccacctctcaggtcagaaaattgaggctcaggctggtgactcttctgtccagagtccagtgagtggggttctgcccaaggtgagcctcctgagccctttccaccctccaacattgcgcttggaggccacccacaccctctgggcccaccttttgagaaggagcttgtttcctggatccaccccaggctgttgttcctgcctcccttgatggctgtgtgatggaagtaccgcgtgtccacttgctttttatctttcaacttggagatagaggcaggctagatagcggtcttggctgagaacttagcccaggcaggtaggcagaagggctggggacactgaggccccacaggaaggcggctgcagaggtagagggccatgagtaggtgccaacctggagccgtgttctcggggtgggggccatgtgaaaagaaacctgggctccctcgggtggggcgtaagccccagcactacagaatgggaatggattacacaatcggggccataagcaggtctctttgacccagatctttgactttcccacctaacattgtttgcagacctgcctatgccctacctgcctgggctccatctctgaccttttgagtccagcgggttttcttgcaactgagctggtagaaagtgaggctccttaacagtctgggggccttgagtgccctccccagcagtttaatctttcctttctttaaatctgtggggagactttctgcagctatacattttaaatctgcatagagttctgtttgaagagaggtgggtgggggcccaggtctccaccttgttctcctgccttcaccctctgccccacccccacggaacctaagaagattccaagtaaccctcttcaaatatggatgtgagagggccatttaagaggtgggtctatggcctctctcagctgggaatgcttaccatctctccttcctcctttttaatcatggaactctcctcctttctccagaaaggcctccttggctgtcctctgctggaggggaggctgggttgggtccttcctgggacctgtccatgtctcccatgaaacctgagagcctgtccttagtaggtgttgtgttagtggtggtggaaaggacatctccactgattaaggaagtaacttggaccatcttgcatagacaagatcggaggcccattccggagggtggaaactgcaagaccattctggggaaggatcctgttagcgtggctagcatcccatctcgggacaaagggttctgtatgaggaagccatttcctcgtcctctgctaacactggctccgtttgtgtgatttccacaaattatctcagaccatccagcgcagctcatgcctgtcttgcaatttcacaaaataatcctctaaggagaccagtgtcctcctttggacttccagttattcacctcgtcccctcagacggtcgtcttctgtctgccaaacaaattactcgtgctgccaaaactccactgagaatctccaggaagatctcggttgtattgcagaaaagaggtgggccctgacgagattcctgacacctccctcttcctgctgttgtgtttgggacactcttgctgacctccctggtgctgtgctcaagttgaacacacagcagttcagtttcagctccagcccctctggacccacacccagggagtgaatgcggctttggcttgtttgagagggagacagtggggttcaccttcttagtgatccctttttcattccttgaatatcaaacatcactgatgcctcctgggtttcaggctccactgcaaagtacaggggccctcgaggagttcctactgtggttttgttctctgacatttgtactgtttccttgattctgattgctctgatacagttccctaacctctaaactagggaactttcttgaaggtccagtgaatccacccatattgtttgctgagttgattagttaagaaagacagttcgtgaagactgccaacttcctcaccctccccagggccttgagtttcagaagggccagaaaacaccaagagagcccatgaactgctttgtagcttgacttcaaaatctctttgggcaaagaaatgacaaaggattgtatccacagtaaggcagggctatccagggcctatctcaaggtggttttccttgaggttcaggcagaaatggtgctgttctcggcaattttctggggaagttgctacagcaaacagccacagcacatgttgattttttccctccttttaaaaatctgttctataaagagcacaatgtgctggagagaacactggctttcatgtggccttaaaaccaggcatgttacagagggtggaatctgggccagttgctgttggtgacaatcgatgctacccttgtcagcaattcccgcctgctctccctttatctgcttcactgaaggcctccaggggactgttgtccgccctcccccgagggaatgagtgccacacctgcacccacaacaaaccagtgagtttttcacctttccctcagtagggaggaatctagacatgtggcctttggaagtcaagtgggcctttgtgtttgtttttgagcctcaggttacccatttgtgaactgggtataatacccagcctctcccggggcaacctccttgaggagcaagtgaaacagtgtgctgagtgaatgcttttccaaagcattgagttggccgtcttaggaaggtactatgggggagctgaaaacagagaaccttctgggtgttgtgaagggagaaaagttcaagatgctggttttgccaaaagctcaagcctgctcatgatggctcagtggtgactgcagggtggaggagaggcatgtgactgtcccagctgacctccacacgctgaaagcctcatggtcacgtgcagcccaccttacaacgttgtatctgggccacgggtggtggtgaggactgtggatatatttagggcaatgtgagatcattgtcaacattccctttaaggttgctttaaccttaaagcagccagcttgatgcttgctgacttggggcacacatcttaacctcttgatgcctcagtttccccgtctgttaaatggtgacatgctggcacctccctcctagggtttctgtgaggcttaaaggaagtaccgggtttagagtccagttagtgccacagatactgttcctggtgctgtttttgtggtgtgtctgtgtagggttacattgttgccttcctgtggctgctcttcctggtgggcggaacctggaacttctagaacagatcatggatgtttctctgctggataccccttcagcctcaccctgtgggagttgtggcggggcccaggagagtttgctcaagagggtgtgcaggtgggtggcagagctggagcaaggcactagtcttaacagacaggagtctgaggctggcagaagtgggggccttggtccaaggtgcggggctaatctggccagagctgagcctggcagggccttggtaagaccctgtggcccttttgtcttggtgaagcaccttcctgcctgggtttccatttgcctgtaagtttgttgtggacagcgtgatctccatagacgtacactgtgcctactttacagatggagaaaccaaggcccagagaggaagtgacttgctcagagtcatggaataggaaagtggcagggtccccatgccctgattcctaggccagcgttcctgctgccccactgaggtttttgggaatcacaggctctgtgtgtccccctcagtcccccaggggctgttgaacagttctcaagtggtgtcggattactgaagatgcctctgcccactgccctcccaggtcccagggtcacgggtcacgttcttttcttcctcgggcagatcctggccttggctttgcctggcacctgtgatccagctctcctctgactctcctgggtctgctggactggaagggtatttgtgtagcccctcttgggccctcattactcattgacagacagtgctggtggagagaagggccccagtggtgacgcactgggcctgataatcagaaaccttggtggcatttgctgagcattttccatgtgtccctctcctcgctgggactctaggactgaaacccaggccacatcctcacagatgtcctggcatctccaaggcaaccctgaaaggaaagtatgttgatgaattaagcaactgtttgcttaattctccatgccattcttgaatttaagccccactgctgatcattgggagcaggagttagcatgcccattgacagacaagcaaactgaggcaaagaggttagatagccaggcatggtggcatatgcctgtaatctcagctactcaggaggccggagtaggaggatcacttgaacccaggagtttgagaccagtctgggcaacatagcaagaccctgtctctctaaaaaacaagatgaataatacatttttaaaaagagattcgataaattatgcaggatcacagagctaataaatggtgacaccatggcctgcaagccttcccccagctcctggctacctttcgcttctctggcattggtcttctcggaattcctcccaggcaggtggatgggaaaagaagtgaagatacaggctggcagctggtgctgtgacctggagccctgtttttggtgctaagctgggttttagctgaaggagacctgctggaggggtttcttctgtgcttcttggggagcaaagatggccttggagatggagacacggtttgtcagtcccaagccactccaaaggtggggctggtgggctaggagtcagccctggttcccccgccatgctgtgtgtggccctgccttgccaccccacctgctggaggacctctttgatgctttctagtgggtcccaacattctgtgattaggactttgcatgaggcagagggagggcaggagctggagtccagcaaggacctcaagcccagggacaggctccacctgccacacttgctaagccgtgagggcctcaggtgcccgggaggagggagcaggagtggaagcaccagctcgagccgccaaaccaggtcacgtatcacctgccatttcctgctggcagaaggagatcacagacaccagaagacagcagcttctgccagaactgggtccttccatgattctcaggtggtgactttgaatcccagaaaaagtgttttggggagagtggagtgaaggaagagtgtgaacattggatctgactccactccagcccctgtgctgcagccagcagggtgagctcaggacagctggcagccgcttgggcccagccccctcctccgtgaatgaaggtggtggggagtgcacgtgtgcgtgtgagtgcgtgtgagtataaatgactgtggatgtgagagtccatgaaagtgagaatgtatcagtgtgtaagaaagtgtgagtatgtgagaatgagtgtgtttgtgagaatgtatgtatgtgtgagtataagtgtgtgaatgtgagaatgtctgagtgtgagaatgaaagtttgcaagtgtgtcagtgtgagggaatgtgtgagtgcatttgagagtgtgtgtgtgtgtgtgtgcgtgtgtgcacgcatgcactagattaaataagaatgcatccaactgacattttctggatactgttacctactaggaattactaaaatcagctattccagaggagggtggatgtcgcaccaggggacatttggcaacgtttgcagattcttttgctggtcgcagcgtggggtgtatgctgtgggcatgtggtgggcagaggccagggatgctgctgagcctcctcccgtgctcagggcagcccctaaggcagaggctgcttgtggggcccaaatgtcagcagtgctgagctgaggatctctgtccaggaggcacagacgctgtcctggatgctgtccagacagcatctgctctgccctccagggggacagacagacagtggacacagcccagatgcagcctgatgagtgagcccaagggagtgcctgtcccctcgggactgtgagctccgtgggggcaggaactgggtctgtttgctcatgatccccagatgagtcccatagccagtctcatcaccatagctggtgttatttttgttctgagctctgtgttgggcacatagaacctagtgggtagaaacctctgaataaatcctgagttttccatcctgcttccgtgaactcagatgttctttgagggccagcctggtggcgtgggggctgggagtgggcagattgtagggagccaagtcctggggtggagtggggttcaggcccctttccctggcttgagccgaagcaccttggctttttaaattttaaaatttttattttttaacatttttatatgttgaacttccttacatgatttcctttggataaaagctcctgcaaaaaaagtttgaaaagttttttggttgaggcatcagggacaaggtaagggctgcttgatgggcccaactcgggagaactgaggtgagggagccgctctcctcccaccctacaggctggccagatggtggaccgccagcagctggctgggtcaacctgcagagagcaccttctgcagtccttggttcatgcggccttagtattgcaggacgcgaccaacatgcaggctaccccgaggcctgcagcccccacagtccccccagactagtgcaaagctttatccagtctcccggcagacttcagagtctaggacacttcctaaatggttcaaaatcaatggaatcatttgggggacaataaataatgtcactagacattgccaaatgtcccctgggagagaaaatcccccctagtttagatataccccgtgatcatcctcagcagttttatctctggacttcccaaaggcctttagcagtgagggggctgggtcagagaaggccccaccagctcccaaaagcagatgctcaagaacttgatatttctaggacacacagcgatttttttaacccattgcctcatgtggtctgggaagctaagctgtaggaataaaaaaggtgccgggtagggtaaagaggtttcaccagatagaggaaacggggaaggtggacatttctgtcttttctgttctggagaacgagagagctggtggagactgacagacactatgtcctaatgtgatcacggtttctggaagccaaagagaactgaccaaactgggctgaaccacagcatttctcgagtccttttaaatgtagaatttgttttccagacattgcactcttggggtttagcaatgatttaaaagtgaattttactgaaagcatgctgttgagctacattgctcatttattcagagagggagttgcagcctgactttctgcctaggagagtctctcgtgctgggagctagaggtagagaaaagaacaagctacctgcttgatgaagctcacagataggactgcttgaacccacctggtgggacagtgagagccccctgacttcaccctggcgcgctttgctgagcagggtatgctaagaagctcctgtgaaatgagaagtcctttcactcccagaatgaggggtggcgttggcagggccctgggtttctggaaggctccctaggccatgtaggcgaggtgtcccacaggccagggtcttgggaccacgaacctgctgaattagcaaggctaacagacgcgggcctttcatgcctcctgcctccaagctggcagctgcccaggaatgctcacaaatataaaaccgactttgttttcagaatgttctggagcatagactccaaagtctgtataaagccattcttgtggggctggttatctactggggaaaatcatgctggggccccagaccagagcaccccagtggagagcaggatctgcccacggaatgccatgtgttggcacaagggatggacccggggtggattcggggtggcccgcacttgccggctgacctctaagaggtgtttcaccaggttcttgggagttcctgggtcttcagaggagccctaggcaggaatttcagaggcttgcattctctcgaccattgcatccgaggggccttgggcagtgcggggcccaggttcccactctgaagctggctgtgtgagggctttggtcaggcgttttccattcagaaagtctggatctgtgaactgggtgggtggcctgggctcttccctcttgtcacttacttcttctccgccggtcctctgctgctgtctgtaagacttgaccttattctgcattttttatgcttcaccccagggattgatgggcatttagtttttctaacttgactactgatctagaagaatacatgcttatacttctggtttctagattcagctcttggaggcatgcttaatagatagcaccacctgcccaagccttgcaccccagggagtcagtggcagcattccaagtcttcctgggctgtgcttcagtctggttttgcagcccacacttctgcacctgccctgtgttagagcacaggtaacccctctggtccatcccctgctttgatccaggaagtgctttctgccttggaggtcttttttcttacaaaattgtactgtgcgttcaaatgcctgccaaactccttgacttaaggttttcctctgcccctcttcccttttagcaggcagccgagagtcctgcaccgtggggtgtgtatgtgtgttcacgcgcatgcgtgtgcctgtgtgtctgtgcgtctgcatcaccaaccttctgttagggctaactgtgaggctgaagcttgcactatgcctatacgtggtaagcatcgtgtgagcttgtgttcccctttcattgtcacacgggggctgcctgactttgggatcagcaatgcaggtccccttctagaatgcagtgagctgcatcctgggtatggtgggtgggcctgaacttggtatggggacctgtttgtgaggctgatctatccatttcattgggagggtggtgtctgtgagcctcagtatcctctcccaggaaatccactgcgctggccccaatgggaagactgggttgggtccatgggctgtgtgtacaagggacctcctcatcccctgcagtgcatcacgagggaggtgaagctgctgggcagagcgcaggcctggccttcttgccattggtcttggatttgcttcctttaggaaacctctcagcaggaagtgttgaccttttggcctttgtctccttgcagg

SEQ ID NO: 52 - DNA, 5987 bp, Homo Sapiens
tttctaacctgtatcatttttcttatctcaataacttcttttaacatttctcacaaagcagatctactggccacagaatgcctcaattttcatttgtctgagaaaaccttatttctccttcacttttgaaagataattttgtagggtacagaattctaggttgtaggttttttcccctcaaagtgaaatatttcattccactcttttcttctttgtatggtatctgagaagaagtcagatgtaattcttatcattattacttaaaagattgcttctgttcctttctctcttctccttcccttctttccttctctgtatattacaccttttatagttgccccatatttcttagatattatgttttggttttcttctgtgtttttttctttgattctcagttttagaagtctctatttatatatctgcaatcgcagggattctttcctctgccatgtccagtctactaataagcccttacagacattgttgacttctgttccagtgtttttgatctctagcatttctctgattatttcttggaattgccatctgtctacttacattaccaacctattcttgtgtgttgtcttatcatagtaattgcagttgttttaatttcataggtattgtaatttcaacatctctaccatatttgacattgattctgatgcttgctctgtcttatcaagctatgtttttgtcttttagtgtgacttctaattttttgttgaaagccaggcatgatgtactgagtgaaagaaactcaatacattgtaatgtgacgataagagttcaggggaagtgaagcattctatagtcctatagcaggtctcggccttttagtgagcctgtgcctatgaacggtgactttcaacaagtgcttttcattccactcttttcctgtccttaagtgggacaagatcactgggggggggctagaattgggtatttcccttctccaatgtagaagctaaagagagggctggagttgggtatttttcttcccctgtatggaaagctagaggcagttaaatttggatattttccttcttctaattcagttaggctgcgacaaaaatcccgacagtttaggctctaatattataaaataatttctcttgagtataggccttattaagaacactatactctgatggagctgagggggagttttctctgatattcactgcgagaacctcgtagagctccaggaagcaaaactcacaaaagtgtgggagtcttccagaatttttcctttgcagacttatctgcactgaacctccagaaattcatcaattacagttcaggttttcctacccaggtactggttttcatggaggtttctgcctgtgcatttctgctccagtaagttgttcttcttgtatggtctgtctttcaaattttttaagtagggttatgacctgtcgcctcacttctctgacagttctgagagtgttgatttttcagtttgcttagatttttacttgtttttaggatgaagtgacaatttccaagctcctccctgacatgccagatcagaaactgaaagtcctaagcctcatattctgtgcgtgggtatgttcacatcctgcctgctccagtgcccccacctcacactctctttcccttccttgtccccttgtgagatttctaggtccaatacaaagactgtgttcaactcattcaactactttggctcatctgagtattataatgaacaatcacaaaaaaaaatgaagtaaaagaaaaatccatcaaagaattgagatatttgagaaaaagaaaggagatcagtgttttataaaacttagaaatagattttttaagtgtttcttcattgacttatgtgaaaggacttttcttaatttaacaaattatgtgctttcgtttatagcctcaaaacttcttgtgtagctaagaatgggtaaataatcaggctttactaaaggactaacgtaaagatcttctgtaagtaacatttctgctactcaaggaagagataaacttcatggcataaccttgccaaagtatactaagaataaccctgacacaaagctcttttttcagccaacatgccatgaaagaaagaagacaaggggtgatctccactctctaagtgaaccactaaacccaccaaagaagaaacgagggaaatagaaagaggacccttgcctgagataatggatctgtatgtatgagtagtagaaccctgctcaaagtacaaggaagggaaaaaaaagttagtttatttggaattttggacattaagagtctttattgttcattttcttttaactcacatgaatggcttatcacttcaattaataaatatttcatttcttttcaacatattcatgaaacaaatctgaaatgaacagtgcaacatgtgaatgtttagaacattataaaattaaacacaaaatctgtctggcaatcttcctagcatcttaggaaaaaagttgacaaaatttcaagcagcagaagggggcagtaaaactcaacagaaagctctggaagatttttaagattcttccttattttcttttcatgtagattatttcccaacaaatttcagacgctaatagaaattttgtacaacagatccatatatttgcctaaaatagacacagaaacattgaatatatgcaaacatgagagctataagttttacatgatcaaaccttttttttatggtacacaatagtcacagtacttttccatataaaacaggtttagtggtcttaatttagtttggcacatttaatacactcccatgaccagcatcccaaatgtacctatccgttttattttattgtctcagaattgtcagttatttaataaattatgtaacttttttccttatgctcagatttgcacttctttctaaaactctgcccatccttaaagtcccagattctccttgaacttttttttttgactttccaagtacatggaactcttcactctatcctgctatataagtgacagaatttccactatgggatagatggagttcaattcctttgagtttaaaataatctaaatataattattccttatgccctgtttttccctcacttttgtatccaaatctcttttcagacaacagaacaattaatgtctgataaggaagacaatgatgatgatcacttcaaaatgaattcaggattgtaatgtaaaattttagtactctctcacagtatggattctaacatggcttctaacccaaactaacattagtagctctaactataaacttcaaatttcagtagatgcaacctactcctttaaaatgaaacagaagattgaaattattaaattatcaaaaagaaaatgatccacgctcttagttgaaatttcatgtaagattccatgcaataaataggagtgccataaatggaatgatgaaatatgactagaggaggagaaaggcttcctagatgagatggaattttagtcatccgtgtctcatgaagaatcagatgtgtacactaagcaaaacagttaaaaaaaaaacctccaagtgagtctcttatttatttttttcttataagacttctacaaattgaggtacctggtgtagttttatttcaggttttatgctgtcattttcctgtaatgctaaggacttaggacataactgaattttctattttccacttcttttctggtgtgtgtgtatatatatatgtatatatacacacacacatatacatatatatattttttagtatctcaccctcacatgctcctccctgagcactacccatgatagatgttaaacaaaagcaaagatgaaattccaactgtcaaaatctcccttccatctaattaattcctcatccaactatgttccaaaacgagaatagaaaattagccccaataagcccaggcaactgaaaagtaaatgctatgttgtactttgatccatggtcacaactcataatcttggaaaagtggacagaaaagacaaaagagtgaactttaaaactcgaatttattttaccagtatctcctatgaagggctagtaaccaaaataatccacgcatcagggagagaaatgccttaaggcatacgttttggacatttagcgtccctgcaaattctggccatcgccgcttcctttgtccatcagaaggcaggaaactttatattggtgacccgtggagctcacattaactatttacagggtaactgcttaggaccagtattatgaggagaatttacctttcccgcctctctttccaagaaacaaggagggggtgaaggtacggagaacagtatttcttctgttgaaagcaacttagctacaaagataaattacagctatgtacactgaaggtagctatttcattccacaaaataagagttttttaaaaagctatgtatgtatgtgctgcatatagagcagatatacagcctattaagcgtcgtcactaaaacataaaacatgtcagcctttcttaaccttactcgccccagtctgtcccgacgtgacttcctcgaccctctaaagacgtacagaccagacacggcggcggcggcgggagaggggattccctgcgcccccggacctcagggccgctcagattcctggagaggaagccaagtgtccttctgccctcccccggtatcccatccaaggcgatcagtccagaactggctctcggaagcgctcgggcaaagactgcgaagaagaaaagacatctggcggaaacctgtgcgcctggggcggtggaactcggggaggagagggagggatcagacaggagagtggggactaccccctctgctcccaaattggggcagcttcctgggtttccgattttctcatttccgtgggtaaaaaaccctgcccccaccgggcttacgcaatttttttaaggggagaggagggaaaaatttgtggggggtacgaaaaggcggaaagaaacagtcatttcgtcacatgggcttggttttcagtcttataaaaaggaaggttctctcggttagcgaccaattgtcatacgacttgcagtgagcgtcaggagcacgtccaggaactcctcagcagcgcctccttcagctccacagccagacgccctcagacagcaaagcctacccccgcgccgcgccctgcccgccgctgcgatgctcgcccgcgccctgctgctgtgcgcggtcctggcgctcagccatacaggtgagtacctggcgccgcgcaccggggactccggttccacgcacccgggcagagtttccgctctgacctcctgggtctatcccagtactccgacttctctccgaatagagaagctacgtgacttgggaaagagcttggaccgctagagttcgaaagaactccgtggatattccagctttcccacaagcactgatcattatgagccagttacttaaccgatctgagacactctcacctcctaaatagggatagatgatactaatttgcaggttgtcattatgataagacaggatctgatcaatatatgtgaattgtttatatttggaacctttttattgagtggaagaagttgttttaaatattctagtcagttctttcctgctcccaggaaagcccggattatgttttaagataagcaaaatgtcttaaaagtaagctgttttactttgaatttttccctaaatgttgattagtgtactagatccattttaatttggaaagtgaagtgctacttatttgaacttcttaaaaatgctaattttaacatctaaagagttaactaagaaaagcttagtaacatgatgtaccaagttgaatatgctgttatccttatttagaatagaaaattggtatttctacgttttatccattctaaggcaggttaaaaaattgtatttccatgactacctatatatttcttgaatttattattgtaaagttgattcatagtcaaacaattaaatgtttaaattaagattaagacactagagaatgatttatttgctgtcctttaattgcagc

SEQ ID NO: 53 - DNA, 5683 bp, Homo Sapiens
atggcaaacacttgaaaaagcttccacgctgaaacccaaaccagaccatatttaggatgccccataaggtggcattttttactaagatgataaaggataaacattggtggagccagagaggctgctcccaaatacagtcctccccatcagcaacactgcagtagcctgcacctatcgtccagagtatgaaaaagacttttgccaaagacggcttttggggatttatcattattacatgttaagagcctgttctccatgtcctcaccttcctaccttgctaatcttccccatttccatctttcggcccagtgtgagacctcaccatctccttttcccatcttctttcctccatacccttggtttcctagcaggtcaatgcccctgccccttcactggaatccatccatcctggttattcttttctttatgaacctgctggactacatctcaaagttacccaaaagagggatacaaagacacaataaaatcggaaataacgctcacccttaccagcctgcagttaagagtgtgtggaactagggtggctgcaggcaaagagatagggggaagggctgcctcatgccatgggcaggacagtaaatggtgcaaattttctggaaagcatcttagtaatataggtgaagagcctttacaatgtgtttatcctatgacctatccttacttctcttattctaaaggaataagaagaggtttaatcaaagcatgagtgaaaaggccatccaaacacagggaaaggggccgttatgatgtctacggttctaagaaatagaaaacaacaacttggcttaaataataagcacataaccaaagaaatctagaagtaggattcccttaagagttgagagatttagcagctcaaaaatgtgacctgacatacgagttctttctatgcttttgttcttcctcctccaacactggtttcacactaaacttggctccccagtggccaatagcaccaaacagcacttatcggcattcttgttggtatccaaaagagatggagaaagcctgatttcacatggctcttccttaaaagcaacaaaggacttttcccggaagccttcagcaaacctcgtcagatttgaatcacatgccaattcctaaatcagtcactggcagggaagtgggaaaaaggggaggaggtgtttacccttaaccaatatgcctacccctgcccactgagatcaattccataaaagtattgcttcagttctttgaagaggagtacaatgtttgtgagtcactcaccacatttacccaccaagagctaagggataactgagtaaaatggtagagctggtaggaaaatggtgagtagtcccgtccttctgtgccataattgacttgtacacaaagagatttggaaatttaaacataagaactctctcttcccaagcccagggctttgggcacttcaagtctggtccttgcctgggcacagtggctcacgcctgtaatctcagcaatttgggaagccaaggagggtggatcacctgaggtgatgagtttgagaccagcctggccaacatggcgaaaccccaactctactaaaaaatacaaaaattagttggatgtagtggcacacgcctggaatcccagctactcaggaggctgaggcaggaaaatcgcttgaatctgggaggcaaaagttgcagtgagctgagattgtaccactgcactccagcctgggagacagagcaagactccatcccaccccccaccaaaaaaaaattctggtctttacatgtgaaaaaataaaagctaatttttaaaaactaaataataaagagtgttaggtgataagttttatgatagagataatgtgtgctttaaaacacacagcataaaacagatggaaaacacctcatggagaagggagagcttgaattggtgtttgattgaaggacaagaaaaatctgttggtaacttcctcctggctctgacctctgatgcagttaaagtaaagcaacttagaattatgatctagggaacatattcagagagaaatgaatttatgatgtcttcaatttgaagatgctatgattttagactattctagaatacaatgatttttcattgcttcacacttgtaagaaatgttccactactgaaaatttgcaacacttaaaaaattcctacacaaaatcacagcccaccttgctgttctatgctaaataaacaaaatattttttctcaattatgttgctctccttaattacacgcaattttaaaactagctgtaactgacagccctttcctcacacttactgccaatgtatttaggtcaatcccacctccaattagagaaacttagaaaaaggaaatcctacggtgaaatgccatatgccttacaattttcagtaactaatcctcaaggatgacaacttggcaaaaaagagaactggaccagctccctgaaaggtccatcacttcggcccatgttaattgattgccttaaaatcacagtgcttccaggttgtagagacacactcaaaatggactattgccctcacattaaaggggataggttttcttttcccttttcccatccctgcttctctcaaagctgcacagaggtatatgaggtttggggaatatttgcagcacatgttggctggcaagaatgtgggtgaattcctgttaaggggcgcagacactccctcttctatgacctttcctttccacccagaacaactgaagtatcatgataagaggaagggctttgtgtttgagataagcagctcctatacctgtcagctttctctaataagaaagctctttcctgccaccgtataggtcaccttcttattggtaaagcatgatgaagtttggaaactgttgtccttgttttgttgaaagaagccaagttccaagaaatctgcagaggcattcctacaatccctcagccatggcagcatgaatcctgaaggggcagtgagtgctggtttctactctgtctgcacagctaagcctaggggagataatcttttcatacaagatgcattctgcttttgtgggcctcttgcagccctcaagcccccatctgatttgtacacaatgatccagtgggccagaggagcccagagccatgagcggcccatccctccaagaactatttctgactgtccagtatcatggagcaagtggaaagaagaaaaaaaaaacccaattacttttcgaagagcaagatgaatgctgtagaaggagaaggaaggggagggagatggatgggtgccgattccagaatcttcagatctgcttggatgaatcattacctatgatttgcgggacaagaatctgattttattcatcaaccagtagaaacttttctttctgcctcccaacatctgaaatccaacaaacatgtgccttaggaacataccggtcatcttttagaggcattttatatacatattgagtaactagaaaacactctttccgtaatacacacacacacacacacacacacacaccatcttgtcatacaacactcccacgcaagaaaagcgaaactgctgtttgatgaatgtaaacacttggctgtttgcagcagtcgggagtcctgccaggtttaagtgctaagatgggaggtgaaccccaggggtttccccctgcccgtgctgagatccttatttggtcaagcttctacctatgccctggcctcggagcgagcccgatagcgctggatcacagcagagggagcgaggcggctgacgtcccatcccgaagagatgaatggaattccaggaagctagagtcatgctggcttgggacagtggcttggagaccagacttcaatgacagaagcactaggcagcggcactcatggcaatgtgtgcacccacagaaatgtaacccacacctcgggttcaggagccgaaaaatgaaaagaacgtttagggaggaaaaagggaaatacaataataggcagagagtaatttattactctatgggtctgctctgtaaatagctgaagactctggagccagatggttctgcaaattctccaaacaggagtcacgttaagaagcacgagtgggcacaaaaactgtttttcaagacacaatttcaatttggcttgtggaaactggatacgagtaagtttccttaaaattcgagtagaaagcagctgtcctccccgggccccttgatgagaatacgcacaccgcccccaagcggccggccgagggagcgccgcggcagcgggagaggcgtctctgtgggccccctggcagccgcggcaggaaagggcccgaaggcagcgaaggcgaacgcggcgcaccaacctgccggccccgccgacgccgcgctcacctccctccggggcgggcgtggggccagctcaggacaggcgctcgggggacgcgtgtcctcaccccacggggacggtggaggagagtcagcgagggcccgaggggcaggtactttaacgaatggctctcttggtgtcccctgcgccccgtcggcccatttttctttttacaaaacgggcccagtctctagtatccacctctcgccatcaaccaggcattccgggagatcagctcgcccgaaagcccctgcgccaccccgcgggccctcctaggtggtctccccagccccgtcccttttcgggatgcttgctgatcaccccgagcccgcgtggcgcaagagtacgagcgccgagcccgtgcgcgccaaggctgcgtgggcgggcaccgacttttctgagaagttctagtgctcccaagccccgacccccgcccccttcactttctagctggaaagttgcgcgccaggcagcggggggcggagagaggagcccagactggcccccacctcccgcttcctgcccggccgccgcccattggccggaggaatccccaggaatgcgagcgcccctttaaaagcgcgcggctcctccgccttgccagccgctgcgcccgagctggcctgcgagttcagggctcctgtcgctctccaggagcaacctctactccggacgcacaggcattccccgcgcccctccagccctcgccgccctcgccaccgctcccggccgccgcgctccggtacacacaggtaagtcgcccccggcggccgccgaggaccaaagctgcccgggacatccacctggagcgctgaggcttcagtccctctggtggaccccggaacctacactctccccgctcgcctaccccagcccgctcctctcagccgctggaggactcttcagggcaaggctccagagccatcctctccagccttgaggttcacaaaccaactcatcaggacaccccaagatttccttactctctgaagtcctccttaagcctttgtatcagcactccagggaagagtctgtacttcccctgccctccctgcaaccccaaactacagttcctgatcttgctcaccttcgacttcccaaaagcccccaaattgttggtcttgcgccccccacactttaaaaccagcatctctttcctccacctctctctctctctctctctctctctctcatgctctctggaaagtaatcctgttgtccttcatttcagcaaacgcggggtcaaagagggatggtcccggccctgtccccatgcccagccccgtttctgcgcaccgtccctccctgcctagctgatctctgaccctcggctcttgtgcttcctgctacagg

SEQ ID NO: 54 - DNA, 7833 bp, Homo Sapiens
gtctttggtgagatatgtgttttacaagttttaatggagaaaaatgtaagtattttacctcctgaaacttggctatttgagtaatgagaaaatagtcactttccccaggacagtggttctcaatcatggctatgtgtttctccaggaaaactttaaaaatatatatataccaatgcttctgtgtcacttctagggattccaagtctttgaatacgaactctgcatcagtattctttaattatccaggtgattgtgatgtgaaatcatgactgagccccactgctctaagatgaaataaactttcctcagcactgaaatcacaaacttaaactaccaaaattaattaagggcatgggaatcaataaggcatagggaagcttttacattataaaattatttctttaaatcacagctcattgtttatatgttatttgccattgtagaaaagggtgaaaaaatagcaaatttaattactctcagtttgaaaaattatccagaaatgaagatgacgactctgaaacattgtcaatatcatttgacctataaataatgttctaatacatttactacacactgatagatactttttcatatgaatattatacattaaaactaaggcaataatgcatttagaacattctatctatatctatgtatcttaagtaggctagaaattaagatatgagttattaagtatgagatgttaaggtgtggggttagaaattatactgtacttcattatcaataatcaacatatacttcaatatcacatacatttaactttaatttgtacatctttaactatttttaattatgtgtataaatataagtacacacatctttatgtatttatttattcatacctccattcacttatttatataggggatccccccaaatccactaccattaaaccatacatttttattttaatctttagaacaagcccaggaggcaggtattgttattactcacattttacaaatgaggaaattgtctacagtcacaaagttactgtgtcagacatattagaagcttaatacatatttggtgaacatatgcataaaaacagagagacagacatgtacaacagctcatctttacactgagtaaaagcttttaacctgtctcagaaacctctctgtgaaaactgagcaaaaatcgaggtatcctttcatttgtcatataggtataggtggtaccttacttctccaacaaggatgaatattgaaatgtggatcccaaggcccaactccagattttctgaatccctgatagtgggacttggaatttgtctattgtttcaaagtttctcaaggaattcatatgatcaaccaggttcagaaatcactggatcttattgccgaagtttgagaattaaagtttgggccttactgcggctccacagaaagggcaaatgaagtatcatggacagaactgatacgttcccagttagtttcccctctcagaagctaacaggcagcaatacagcagaaattagtgacttatgtcttgtgctctgaagtcaggcagaatttcacagagtcccagcagtgtcactgacgagatttgtttcttggggcaagttgcctgatgctttcaaagccatattccttttatataaaatgagataatattctttgtctcataggggtgttttaaagattaaataaaaataacatgttctatcctacatggcacaatgcctgacacctaagaagcaaaggatacatcttacctttattgaagcaatcagaaagtatgaaatcatgaaggagataagagttctgattggcagtgtatcttattttcccaggttcatttatttatcttaaactattcttgttggagaataactcccaagccccctacttaagctgtgagtaatctcacactttataatgatgttctttccatgagaaaaaaaaatgttcttaagttttctggagaaaatatatctgcactatttctactgaaaaatctaacaactggactctgctcctctgcatcaattctagagtgtatatgccacaaataaagtgttctagctcaagaagattgaaagtaaatatggtatagtattttaaaataagaattttgcaaatacatggtatgattgtgtcatattactagcaatcatatgatacgcaatgcaaagtacagttcatagacttaaatttaattctaataagtaaactgattttgccttgctggggaaaagttaaagcactaatccaattgctaatgcagtcttgtctacttctttggtacctagtgacaagtctaaataatgtatatatttttatttacatattcagtaatacaattctctgctcaatgagtgatgttcttctgccacttggtggtgcttgccagtttcagaatttgtttcttggtggcactataacactaagtacagagtaagtgcaacaaaattgcagcattcccattgaaaaggctttgcttcaaactgtttaataatttaaaggacctctgtggaagcaaccgcatttgttaaccagttacaaccagtaattaactcctttggagttttaacttacttttggcaaaacgtcttaggaagagcatatattattagaaagtatgccaaaaatttacttagcagaaaattcaaaaacagttttcctctgctaagaggttctctaaaattctacttacatagccaaactctgaaatcctagcaggtcctgtttcattatcataattactgcataaacacttttaaggactttgcctttagtttcaagcatgacttattttcataagcctgattagttaccacaccagccttgctatggaaaatgacatgttctcattctctgctgtagagttgttaaatcttgatctatatttatgttgccttctctgctgaaagcctgtagcgaaagaaatttctaattccttgttttgcaatattagttggcagctctatctaatgggtattctgtttccttaaagaatttagctgctctgtctagaagccgattttctgatgcctccaacgtctggtctaattgatctgttttaatggagtcttcgtcggtgaggagcgagatgccaccgactagaatgctgggatctgctgcttaattgccaggagtgagagacactgagattcagaaatctttggaggtgggaggggagagggacagtctcggacggaggcggagatgtaagataaagggatggatttcacacaggaaaaaaaaaaagatttcgttgaggcactgaggtgctgcacgatcacatctctcaaaggagaagttaaaaagcaaggaagtgggaggaggttggaggttaaagtacttaaaaggattactcgggtacaatttgtttttctgctggtgtctgcaaaggatagatagtcccgttttcaaagtatatgaatgcctcttttaagtgattgggaatggacactaattgcctgttaaatgttatcaaatgctctcctaaattcaggggacacagaaagaggggcacaaaaggagaatttaaatagaaaaagggaggatccggaggcttttgaaagcggggggagaagaaggaggagggataacagagaggaatagagaaggagagcggagagaagataaacaaaaacaaaaacaggaatcactgaataatcacacaccaaaaagaaagctcttccctatggggcatccaaaacactgagactgcaatagtgaccccggtcatggaagaaagatgttcctctccacccttgtccccgaaagctcttggtcccgttactggcgactaaaattccattaggctaaagagtgtgtctaactgcctgaagaatgcagcagacggaaggcgggtcccgctatgccgtttgcccttcccgctggagagaatgaaagaaacgcgcagagccagagactcctgccgagttagaccttctctcgtcgccccaggtcaccggccatccggcaaagacccgagtaaggaacgcagggtcactgcctgggccaacaaatggagcccgctctccccttcccggacgccgctgcccggccgatgctcccggcaacccacccgcggcgtatgcagaggagcctttctctttctctcagaccacttgtcccgaccaatctgaccttccaaacacatctgaccgcacctcccaggtggacacactaataggctacgggctggagaggagcgggtgatgaggagagggattcaaacctgcgaacgcttgggctgggtcggagctgcggggggcctgggaggagagaggggagaagagagaaggaaggagagcgcctgccgggatggctgagctgcctcggcgagcagccttggggttgcacgctcttgtgggagatgctgctgttgcttccaggtcggcaagagcggttctaacaccatcgcctctcaccctctttcctgtaaatccctagagaaacgtccctggcctctccgccgcgacattcccagcctgcatccccctacagcctaggcggcgcgctcccgcacgctggagcgccggtcgccagcaggacgccctctcccgcgccgactcgcccctctctgccctgctgctgctgctcctctgacacctccgcccccaccatctccagctcggagagacgccacccagccgcggcccgcactcgcggcccggggtcacgcgcggaagaggggcgctagtccggaccccgccttcggtagggggcgtcctggagcggagagtgaggcgaatggtatatgagtgtgcgggtagcccaccctgaagcccgagcttctcatttgagccatgccccgcctagccccactcgggccagcgcctggcgagcgagcccatctgtggcttccgcggccgcctcctccttgcatccttgcacctactcgtcgacccctccctcccgggacctgcatcctgctccaccaatcagagcccgactgcctcttcccacgtgaccccgggcgggctgaggacctgctgcttcccaaacgccagagggatgcgggcggcagagctcgagaggcggctgccgggctgcggggcgccttgactctccctccaccctgcctcctcgggctccactcgtctgcccctggactcccgtctcctcctgtcctccggcttcccagagctccctccttatggcagcagcttcccgcgtctccggcgcagcttctcagcggacgaccctctcgctccggggctgagcccagtccctggatgttgctgaaactctcgagatcatgcgcgggtttggctgctgcttccccgccgggtgccactgccaccgccgccgcctctgctgccgccgtccgcgggatgctcagtagcccgctgcccggcccccgcgatcctgtgttcctcggaagccgtttgctgctgcagagttgcacgaactagtcatggtgctgtgggagtccccgcggcagtgcagcagctggacactttgcgagggcttttgctggctgctgctgctgcccgtcatgctactcatcgtagcccgcccggtgaagctcgctgctttccctacctccttaagtgactgccaaacgcccaccggctggaattgctctggtaagtccagaacccccgtccccgaccctttaactccgcagaagaacacgcgtatccagcacagaccagcctaccctagcgcgcctcctcagcccctcacctcctactgccctagacccctaataccacccacctctatccagagaaacaaggggaactgttgcaggcccgggggtgaggggtggttctgggatgggcagaaagtgcaggtgtagcaggaaacctttgcatgcttgcgcttacattggagctgcgaggattttgagaaatattaaacgggatggttttctgggttcactgttttgaaagagcaccaatcctaggggaaacactgaaacagaagctttgtcatcattaaagaaaaaagtcttactaggatgaggaagaaataactttatgagaaagaatgagcgagaaagcaataaatcaaatggtgactgcaggggaatcgctgattcctggcaaaggtgccatgaggtcgcactggtctcccgttgaagaccaggtcacacagattctagaggagctgggtttcaatagaatttctctctctctctctctctctctctctctctctctctctctctctctatctatctatctctctctctctctcattcccttctctcctaggcggcaaaagacattggttttgcagtccagatatgcccctctctttgcttccctaagcttcaaggtagtacaggggagttgagaaaaagaacactttgcgggtctcccaggccggagtgggcatgactgaggctggtcaggctccatgtaggcgagccgagggcggaaccgacttcagtgggcgctgactcctccatttctggacaggcttctgtggagtgggtcaggcactcttcttgctcgctcgggttccttcagattctgacggcgaacgcttggcaggcttcgctctgctgaagcttcctaattaaatagggccagaggatgggagttgctgcactcctagctggcatagcattcggtttgacagcctgtagtatagggtgtatgtaatttttcatcttctgtgaatataattttgctgtagttaaatctggctctgaataaagtgtctttcaaagatgtatataagctgaagtgtatgtaactttagagaggagggaatgaccaactgtaactcagggtgaaagcctgtatagttcctagttattactgatgtaaatgccaaaaggaaaattattatgcatcattctaatttatcctttacaaagacaagttgagatatgcaaccctattagatttgggtcaatagattgttctcttttttggcagtttctaaatttggcattttaataaaactcaacatgtttctataacttcttgattcatgcgtacatgtgtgttgtttttgaaagaataagtttcactttgctattgcctaatcactttttagatgctttattatggtaataattatgagcctgcaaaaacaatttttggaaatgttgatggctttgtagtccaacacagactggtttgcttcattcctagcccttgcattgttttaggaaataactaacttaaatgtgaagttgacatttgcaatcaagaaattacatatttaccagatattttaaaggggactgcataaactaaagagaataaactggttttgcagataggttgtcaagaacttggcaccccgcttccacccctgttaacttagaggtgatcaatcttcatttgagccaaacagaccatcacagaaaacactgtgcctgtttatctttattattgaggctttgtttcctctttgtctggatacatttcaaataaggggttgtttcagtcgttgaagcaaaagaacaattaaagatggggaaatggtaaaagggtattcagagatcatcactagctcttttccaaaatgtggagttttgtggtcataaatattgtccacctaatgagcaaaaaataaaaataaaaaaaaaacaggaagcaaatgttaagctttcattcaccactgtcagtattaacgcaagctttaaaaaatagcactatcagaaaaggatactaaaggagaattgactagaaaagaattgtggaaaatggaaacgaatattgatcacttaactagattttgaggttatcagtagacagtgaccttgcagtacagctatagttgttggatttaaaatttaggacaagtattttaaagcttcaaagtagtgcttttttttgttaaaaatctgtaagatgttttaatgactggagtgttctctttgaatttgagg

SEQ ID NO: 55 - DNA, 2501 bp, Homo Sapiens
gcaaatttttatattttgaggagagacagggtttcaccatgttggccaggctggtctcaaactcttgacctcaggtgatccacccgccttggcctctcaaagtgctgggattacaggcgtgagccaccaagcctgacgggtagtaatttattttttatataatttttttcttctttttttggtagagacgaggttttgccatgttgctcaggctggtctaaaactaccgggctcaagtgatctgcctacccgggcctcccaaagtgcagggatcacaagcatgaaccaccatgcctggctgtaatttttcatatattccggatattaaccctttaccagataatacagtttgcaaactttttttttccccattctgtaggttgccttttcactgttggtcatttcttttgctgtatagctatccttaagtttgttgcaaacccatttgtctatcttttgtcttgttgcctgtgttttgctgtcatatccaagaaatcattgccaaatccattgtcatgaagcttttccccatgttttcttctaggagcactatagtttcaggtcttatgtttaatctttaataagttttgtgtttttgtatatggtgtaaggtaagggtccaacttcattcttttgtatgtggttatacagttttctcagcaccatttgttaaagacacaatctttcccccatgttctggtgctttaaaaaaaaaaaaaattctggctggttacggtggcttaggcctataatcccagcactttgggaggctgaggcaagtggactgcttgaggctaggagtcccagactagcctggccaacatggtgaaaccctgtctctaccaccgaagatacaaaaattagccaggcgtggtggagtacgcctgtaatcccagcctactagggaggctgaggcatgagaatcgcttgaacctgggaggcagaggttgcagtgagccaagatctcaccactgcacgccagccggggtgacagagtgaggcagggtcttaccctgtcgcccaggcaggagtccagtggcccaatcatggctcattgcagcctacactgccagggttcaagccatcctcccacctcagcctcccaagtagctaggattacaggtgtgtgtcaccatgcccagcaaatctttgtattttttgtagagatggggtatccctatgttgctcaggctggtcttgaactcctaacctcaagcgatcctcccacctgggcctctcaaagcactgggattacaggcgtgagccactgcgcctgacatggtgcttcttaatttattcttactttttatttttatttttttgagacaaggtcttgctctgtctcccaggctggaatgtagtggtacaatcatggctcactgcaacctctgcctctccggttcaagtgatcttcctgcctcaacctctggagtagtttggactatgggcacatgccacaacgactagctaatttttgtttttctttttttctttctttctttctttctttttttttttttttgagatgcagtttctctatgttacctaggctggtctaaaactcctgggctcaagcgatcctcccaccctggcctcccaaagtgctgggatgacaggcgtgagccacgtggtgcttaaaaaaggcaacaaaaaaccccccacacactgggtatagaagtggcatgggcctctatacactgtgagattcttggtactagctacaaattctgtgtatactcaagattttctagagtaggtgcaattaccccgttttacagatgaggacacagaggctgagccgtagtgacccacctaaggtcgtatagccagcaaatagatggaggttggattggaactgaggactttactcaagggctctcacaaacccttgggggcttctcgctgctttatccccatcacacctgaaagaatgaatgaatgaatgcctcgggcaccgtgcccacctcccagcaaaccgtggagcttggacgagcccactgctccgcgtggggggggtgtgtgcccgccttgcgcatgcgtgttccctgggcatggccggctccgttccatccttctgcacagggtatcgcctctctccgtttggtacatcccctcctcccccacgcccggactggggtggtagacgccgcctccgctcatcgcccctccccatcggtttccgcgcgaaaagccggggcgcctgcgctgccgccgccgcgtctgctgaagcctccgagatgccggcgcgtaccgccccagcccgggtgcccacactggccgtcccggccatctcgctgcccgacgatgtccgcaggcggtaggtaccatgggggggaacacggactcagggggacaggcagggcgctgggtggggggtcgcttcccctcggggtggccggtggccgctgctgacagacgggcgcgcatgcgtggggtggtgcggcgcgcagcggcagttggcgcgggcagggtggcacttccggtcgcgcgtgcccgggctg

SEQ ID NO: 56 - DNA, 4138 bp, Homo Sapiens
gaattccggatccggatctatgtccccgcccaaatctcatgtcaaattgtaaaccccaatgttggaggtggggccttgtgagaagtgattggataatgcgggtggattttctgctttgatgctgtttctgtgatagagatctcacatgatctggttgtttaaaagtgtgtagcacctctcccctctctctctctctctcttgctcatgctctgccatgtaagacgttcctcgtttccccttcaccgtccagaatgattgtaagttttctgaggcctccccaggagcagaagccactatgcttcctgtacaactgcagaatgatgagcgaattaaacctcttttctttataaattacccagtctcaggtatttctttatagcaatgcgaggacagactaatacaatcttctactcccagatccccgcacacgcttagccccagacatcactgcccctgggagcatgcacagcgcagcctcctgccgacaaaagcaaagtcacaaaggtgacaaaaatctgcatttggggacatctgattgtgaaagaggatggacagtacacttgtagccacagagactggggctcaccgagctgaaacctggtagcactttggcataacatgtgcatgacccgtgttcaatgtctagagatcagtgttgagtaaaacagcctggtctggggccgctgctgtccccacttccctcctgtccaccagagggcggcagagttcctccctcccaccctggagcctccccaggggctgctgacctcctcagccgggcccacagcctagcagggtccaccctcacccgggtcacctcggcccacgtcctcctcgccctccgagctcctcacacggactctgtcagctcctccctgcagcctatcggccgcccacctgaggcttgtcggccgcccacttgaggcctgtcggctgccctctgcaggcagctcctgtcccctacaccccctccttccccgggctcagctgaaagggcgtctcccagggcagctccctgtgatctccagtacagctcagtctctcacaggctccgacgccccctatgctgtcacctcacagccctgtcattaccattaactcctcagtcccatgaagttcactgagcgcctgtctcccggttacaggaaaactctgtgacagggaccacgtctgtaatgctctctgtggaatcccaaggcccagcccagtgcctgacacggaacagatgctccataaatactggttaaatgtgtgggagatctctaaaaacagcatatcacctccgtgtggcccccagcagtcagagtctgttccatgtggacacaggggcactggcaccagcatgggaggaggccagcaagtgcccgcggctgccccaggaatgaggcctcaacccccagagcttcagaagggaggacagaggcctgcagggaatagatcctccggcctgaccctgcagcctaatccagagttcagggtcagctcacaccacgtcgaccctggtcagcatccctagggcagttccagacaaggccggaggtctccttctttgccctccagggggtgacattgcacacagacatcactcaggaaacggattcccctggacaggaacctggctttgctaaggaagtggaggtggagcctggtttccatcccttgctccaacagacccttctgatctctcccacatacctgctctgttcctttctgggtcctatgaggaccctgttctgccaggggtccctgtgcaactccagactccctcctggtaccaccatggggaaggtggggtgatcacaggacagtcagcctcgcagagacagagaccacccaggacagtcagggagaacatggacaggccctgagccgcagcttcagccaacagacacggagagggagggtccccctggagccttccccaaggacagcagagcccagagtcacccacctccctccaccacagtcctctctttccaggacacacaagacacctccccctctacatgcaggatctggggactcctgagacctctgggcctgggtctccatccctgggtcagtggcggggttggtggtactggagacagagggctggtccctccccagccaccacccagtgagcctttttctagcccccagagccacctctgtcaccttcctgttgggcatcatcccaccttcccagagccctggagagcatggggagacccgggaccctgctgggtttctctgtcacaaaggaaaataatccccctggtgtgacagacccaaggacagaacacagcagaggtcagcactggggaagacaggttgtcctcccaggggatgggggtggatccaccttgccgaaaagatttgtctgaggaactgaaaatagaagggaaaaaagaggagggacaaaagaggcagaaatgagaggggaggggacagaggacacctgaataaagaccacaccctgacccacgtgatgctgagaagtactcctgccctaggaagagactcagggcagagggaggaaggacagcagaccagacagtcacagcagccttgacaaaacgttcctggaactcaagctcttctccacagaggaggacagagcagacagcagagaccatggagtctccctcggcccctccccacagatggtgcatcccctggcagaggctcctgctcacaggtgaagggaggacaacctgggagagggtgggaggagggagcacagagactggctggggtctcctgggtaggacagggctgtgagacggacagaggctcctgttggagcctgaatagggaagaggacatcagagagggacaggagtcacaccagaaaaatcaaattgaactggaattggaaaggggcaggaaaacctcaagagttctattttcctagttaattgtcactggccactacgtttttaaaaatcataataactgcatcacatgacactttaaataaaaacataataactgcatcagatgacactttaaataaaaacataaccagggcatgaaacactgtcctcatccgcctaccgcggacattggaaaataagccccaggctgtggagggccctgggaaccctcatgaactcatccacaggaatctgcagcctgtcccaggcactggggtgcaaccaagatcacacaaatccctgccctcatgaagctcatgctctcatggggaggaagacagacatacaaagagatctagaatgtgaggtcaggtgttgacaagagccctggaggaatagagcagggaaaggtcagaaaaggaagacccagggtctctagaggaggtgtcagggaagggatctcccaagaatgccctgatgtgagcaggacctgaaggcaatggggagggagccgtgaagacccctggaaaagcagattccacacagggaaatgccaaggtcggaggtgctaaggaaataggagacacactgctgaccttgacctagtaggacacacacacacacacacacacactcactcactccagggctgggggatgaagagacctgctcaggacccaggaccccatttttccaccctaatgcataggtcccaatattgaccgatgctctctgctctctcctagcctcacttctaaccttctggaacccgcccaccactgccaagctcactattgaatccacgccgttcaatgtcgcagaggggaaggaggtgcttctacttgtccacaatctgccccagcatctttttggctacagctggtacaaaggtgaaagagtggatggcaaccgtcaaattataggatatgtaataggaactcaacaagctaccccagggcccgcatacagtggtcgagagataatataccccaatgcatccctgctgatccagaacatcatccagaatgacacaggattctacaccctacacgtcataaagtcagatcttgtgaatgaagaagcaactggccagttccgggtataccgtgagtgattcccccatgacctctgggtgttgggggtcagttctacttcccacacacaggattatcaggcctgggctgtgctgtggccccctctgcattacgcaccatgttagggtttgggcatttagtgcaggatacacacagaagagacaaacttcaacagatcagaattc

SEQ ID NO: 57 - DNA, 11222 bp, Homo Sapiens
ggcctggcgctggtccaggagggtagactctgccagggaggcacaagctaagctgggggtggggtgggagggcctgctggcaggagggaggcactgcccagactggcctccaaaggctggttcccagaaggaggaggaagagagtagtgaagatcgtggggagtcctggctttgaggagccagagttctccttcttgccacatctttgatctcccttggtggtgtcttaagcccagatttaccaaagggaattgtcagctgtccaagggctagcaaattcctaggtcacctagattggattttctgaccataaaaactgtgggccaggtgcacagctgcctgaggggctcaaacctgtgcaggtgggtgctggaatcccctttgctatagcgttctctttgtgtgcatgtgaccagaggtgagagtggctggagaccgaagatggcagagcccgtctttctccaccagactgaggcccccgacttgccttgcctggggagggtgctcagtggaagtcctgggatgttcagtctggacaagaaaagtcttgggtgagcctgctccttctcttgtgaggcagactcagctgggcctctatatccccaaggagcaggcggagctgccgcaaggaagtgcacgtgacatggaggcatcttttggttcgacataaaaaaggatttttaaagctttaggtagtgagctcaccactcccaggagtattcaagcagatgccagatgatgatctgtagggaaaactatgtttagtgggaaattggacaaaataccgttgaaggcctcttttagtcacaagatactatggccctataattctagatttctctgcttctagctctctataagtctggaatctagaacccaagtttctccggtgctgaaaagttgaagactttgacactctagaattttaattctgggatctcaagattccagaattgggagccttgaggatgattctacaagtctcagttttggattcaaaggatcctgtgatatgaaagggaaaaagaggaggtctgacttggtgggatccagttttgccccactgggtatcagactaatgtgccctgcattcgtgcgtgtgtgtgcgtgtgtgtagcatgagcgtgtaaggctgtagaaagttttgcacacaaaggcagcctggctttcctatcatgtgtctgcagcttctctgccctggccataatgaaggctgtcacagggataataatagcccccaaacagagctggtgactccaggtagccatagcaactgtgaggtaacgctgctctgttgtagagatgtgtgagtacaaacagatgtcggtgccttcccattagcttaaatggtaaaacttaaaaggtccatcaacttcaaagctacaggtttccatgagcatgccagttaatgggggcgcttgccaagcgggtgatagcttcatattaaacatttcagcatcagtaatgggttgatgagattttaaatgctcaggccatccccagacaactcaggaggccagagacgggagaagagctgggattcgggtagtaatcagccctgccctgccccgcaccctcaggggtgttctgacactctcgggagggcacaggccagagagcatttgaaaaccgcacattgcgtctcaatctccaggagtctcagatctgcctcttggccttccccagcgcaccaggcagggggccccaggtcagatgtggcacagctcaatgccatctccttctttctgccctcctctctcacaccctggactcacctccagcgagtgaccagcagtaagggtcaaactgctgagagtctgagaccggggcagaccctctcagagttgtctttccttctgaggctgggcctggcacagactggggcctcagtaatgggctttcaaatgaatgaatgaacaaaggaacaaacagatgactgactgactgaatgaatgaatgagatcccctttggcatccccatggcttctttttttctttttgagatggaggctcgctctgttgccaggctggagtacagcgatctcggctcactgcaacctctgcctcccgggttcaagtgattctcctgcctcagcctcccaagtagctgggactacaggttcgtgccaccatgcccagctaatttttgtatttttagtagagacagggcttgaacatgttagccaggatagtctcgatctcttgaccttgtgatccacccacctcagcctcccaaattgctgggattacaggcgtgagccaccacgcccggccccccatggcattttagctacttattttgttactgcttcttccactgctaaagagatgggcctttggaggtcggctggcctagcatttggggttgacttctggaatggtcactagggaaggggcgccagaggtgcagccggtgcctctgacccttttggtcgctaggagtcagccgactcagtacacaggactcactgaatggagacacaaggctcctccagggagtggcggctcatggcaatcctagaatggtcaccagccaggctttagagacccacacagagggcgttctgacccaaagttgcactggggaactccaagtttggggattctttgaatttaactctttttctagctacatttcctattatttgtccaattcttaccaaacatctctgttcacattctgaagctgggatctgactggcagagctagtagatgctgactattcagatggagccctgacattggctttctcagcttggctgtgactggcagcaggtttgcgggagaactgtgtgtcccagaacatgactggctacacctgcacctcagcaagattggggcagggcagttatcttcaaaaagctgtgtaggtggggcagtcattactgacaaatccagtgcagacccaggatggcccaaacactggcttatcctttctgaatctcatctcccacagctgtaaagcggggtggtgctcgctacctcacagaggtgttgtaaagattagatgtaatcttgccaagcagccactttgtaaactgtatagtcttatgcagatggaaggaagggcctgtgcctaccttgatcatagcactaaacaaactgtactgtattttcattcctcttagttatctccctaaaaagactctgagttccttgaacacaggaaggtgttttatttgattttgttatcctcagcatgtagcagtgtctgacacacagtaggtgctctatcactgtgagagggatggatggatgggtggagttacagatggatagaaggatagatggagggatgggtggatgatggatggatagatggatggaggggggatgatgaatggagggataatgagtggatgaatgagggaatgggtggatggatggatggagggatggaggaacagatagatagatggagggatgggtgggtgatggatggatagatggatggagggagggatgatgaatggagggataatgaatggatgaatgaggggatgggtggatggatgaatggagggatgatgggtggatgaatgaattgagggatggatggatgaacacatggatggatggatagatggatagatggaggaactggtggattttggatggatgggtggatggatagatgaatgaatgcctggatagacaaagagatgatggatagatgaatagatgaattaagggatgtcggatagatggagggattgatagatgttggatggatgggtggtggatggatagatgagtgaatgcatggatagacaaagagatgatggatggatgaattaagggatgacagatggatggatggatgagtaactggatggacaagtggataaatggatagatggttgaatacctgaatggattgaaggaggatgcatggatgtaagataaggctaatcatcctccactctctttctttgcaaaaccatccacccatttactcaataaacatttattcagttcaaacttggcacaaagcaccatgtgaggcccaagagatacgtgggttaataaaacagagctcctgccctcctgaaaactgcaaagaaaggggcgtggcttcctgagttcaaatcccaactctgccagcgactagttgtacatcagtgatgtttccctactttctctcaattaaatagggataatgtcagtacctatcacattgggaggtcttgcggggattaaatgagttaccaaatgccaagtgtttgggacagggcctggcacccagcaaagtctcttgtgagtgctggctgctattatcctaatggagaagatggcatgaaaaccaggaaataggatgccctttgggaagcaatgcaacaggaacttacacaaagaaaggaaaggaggaagcaattagtggtgtctcaaaggagtatgtcaagaaaaacttttcagagggaaacctttgagcagggtcatgaaaacaggagttctctaagagattgtggacttgcctgggaccacctggctataagcacaaaaccatccggttcctttctgtcacttctggctgggtgaggggtctctggcaaaggggcagaaggtgcgtgagaggttgcgaatggccaggactgtcctggggccagccggggcacctggtggccaagcttagaaacatgacaggtcctcttgggagggctgaccgcagggagcgttgggtttcaggctgctggcgtcggcttctgtggtgccctttctgtcggctatgagagtccagacagtgcccaacctcctccccttctttccacacgcacaaccaccccaccccctgtggcctgagctgtcctgcctcgccacaatggcacctgccctaaaatagcttcccatgtgagggctagagaaaggaaaagattagaccctccctggatgagagagagaaagtgaaggagggcaggggagggggacagcgagccattgagcgatctttgtcaagcatcccagaaggtataaaaacgcccttgggaccaggcagcctcaaaccccagctgttggggccaggacacccagtgagcccatacttgctctttttgtcttcttcagactgcgccatggggctcagcgacggggaatggcagttggtgctgaacgtctgggggaaggtggaggctgacatcccaggccatgggcaggaagtcctcatcaggtaaaaggaagagattccattgcccctgccacccacaccctaagatcaagggtgttcagctgcaaggtggaaagtttgcacgtggggtaggtcagttggctgcattagttaagggtgttagaacggtcacttgctttttctttgcttttaagtgtcagggattggactcaggagagggaaaggagccatttcaggctgatgtcagcagctggaggaagcatgagaatcaaacctaggatgctcagagtccaccaggaagaattttagaattatagacagtcagagttaacaagggtcctgagagattttgtacagccacctctcttacaggatgaggacaaaaagggactgagaaggggaggacatttccagagtcacagctcattaaatgctcttaaagtgtcaaggttaagacatgctcttcaaggggagacagatctggttctagacttggctctgccactgagccactgggtgacctttgggaaagtactcaacctctcggagcctcaatttcctctcctgtacagtgaggggatatcctaatatctatatcctagaggagatgtgagaattaaataaaataatgcatgcaagaggcctggcatggttcctggcatatactgagtcctagaaatgttagtagctattactgatgaagcccaggctagggacctttcaaagcattgcaattagagaacagaagatagaggctcattagtgaccttcgatgttgagtatgtctctagtttgagaggtctgaatgatgtggtctgcaagtatatcctgccttctaccacaagggattccagaatacaccaaagaaaacaaaattctgaggtttgtaaatagagggtggctgtggtttgtacatagaagctcatctcctcgttgccttctatcccaaaggtgatacactcttctcttggccccttccctcaccattctgagctggttccctcagaagtctaataggttaagaatcaacgtttctgccaacgggaggaaggaagtgggcgccggggttgccacaagtgaatggattgtctttggcactttaatttgcagattaatttctccttatttgtgagccagagccaattttcctcttccactccgtcgtcctttgggtctcccttgggctttacccatttccagcttccgtctacctcgggagcatggctggtcctggaagctccgttatctaaaatttgagccgttggtgatccgtgctagaaacacttgaggaagaagagttgagttttctgttgactgtaatggcatcgtagtgtgtttatgtctttcttctcctgtccctgtcatctggctgcaacaggccctgttggattgcacaaagtgctcccccgaccaacacacacacacaaattgacatcaactcctgggccacagatatgccatgtgaccttggacaagtctctccacctctgggccttatttctctgctggttgagcgaagggattgtcttccatggtctccgagatcccgtcccacgctcatgccctagaattctctgagtccttgatgcacttttgcctttggcgaggaggcaggacagtcaggcgtggaggtaggagaccagagtttgcagagcagaggtctttccaaggtgatttgggagctgccagacctaaggcagtgacttgtacgtcttgaaagagactcagggtgttgcatcatcagggaggatcacggaggtttgccgggggccgggagccagggataagacataatgcctagggttgctggtccctgaaaggtcccagaggcctggtgccctgtcacgtcttaggttgtgggacatgcagagactgtgccagctggttctgccctctcagtatttggggtacagggaggatggcctccctgggggcagggtggaggaggctcatgcccaggactgcaaatgccacccgtgagagttggcatcttgactttgttctagatactgactctggattttctaactgaccttgaaaggttatgtctccaatcttctgattgtaaaagagggcaaattccatgaagcccagtctgtaaaacactgaggccttcactgcacgtacacaaacataaaattctagaacacagaagctggaaggtcacttggagattctggctccaggagtggggcttcggaagggagggggctgctgagtgggctccacacccctgtttttcctttctttactcaaaccttttttgttttatttactttggctgttttggggagcggggggaacaaaggatttcaaggtcataaaatgtttgaaaatcaccagtggtggtcactacttctcattacagggaggaactgggcctgagagtctccaccggttaatggcagccacaggcaggaccaaaaattcctgggtgatggtgatgataatgataatgataatgataatggtagagatgatgaggaggagaaagacagcaaccatttattcagcacatactgattgctgggctctgtttaagtgtttcactcactgaagcctgacaacaatcttatgaggtagatatgattatgatcaccacatttaacagagaggttaagtaacttacgccaagtcacacagcaagtaagaaaggagctggaattcaaattcaggcagcttggatccagaatccttgctccttttttttttttttgagatggagtcttgctgggattacaggtgcatgccaccatgcctggctaatttttgtatttttagtagagactaggtttcgccatgttggccaggctggtctcgaactcctgacctcaggtgatctgcccgccttggcctcccaaagtgctgggattacaagccaatgagcccggcccagaatccttgctcttgaccactatgctatactgccccatgaccttgccacacgcaagacgggctgccacccacgctctggttcttttattctagtagagccagaggggtgttcatggatctgacaatgtgctccatgttccatgtgagtgtccaattgggcctcagttcagagaacagcaggaaaatggcctcccttctctctgacttggactgaagatctgtctgatgaaccaggcccactgacagcagggttgaagctggaaacacaggccagcggggctttctgaaatactagagcaaacgccctccgtccatttccacaggctgaggggctttcatctgttcattttccggatcaggcaaatccaggagaatggccttctgtggctgcctggggggctcctagctgcaaggcctgggcccacaggaggcaggcagctgtgtggtgccggaatgatcttgcggggagacaaattagcccgattctgctctgctgtttaaagtaaatatggggtggggtggggtggctcaggcctataatcccagcactttgggaggcaggatcggggaatcgcttgagtccaggagttcgagaccagcctgagccacatagtgagaccccccttctctacaaaaaataaacaaaattagctgggcgtggtggtgtgtgcctgtagtcccagctacgcgggaggctgaggtaggaggatcacttgggcccaggagattgaggctccagtgagccaagatcacaccactgcactccagcctgggcaacagagcaataccgtgtctcaaaaaaatattaataaagtaaatatgagctctctccctggctgtctggtgttgagtggaaagaaaggcattggcgggtctagacccttttggtttacatatggatgagcaatgatccagagaggctaagtgacttcaacatcacagagcacattggcgccagaactgggaccggaactcagcttccgtaactgtcagtcccatgttctcttccctagatatcagagggcaggggcaggccccaaaatgtctgagacccccagctgccttgtggcccaaattcttggccctgctctgcctcagacagtctgctttcagcgtcctgacctctgaccatcgcctgtgcatgccaggtcttgcatctgtcaggcgggagttcaaggatcattgtcgccagataataatagtcaggagctcagggacccttggatgaaaggtgtcagagacaagccgtcagtgacgcacgaggatttggataaggtcctggagcgaggtggcaatgttgggcacggcggcagaccatgcccaacatgggggaagggagtgtatgtggttcaggcttgtgcgtgtctctgtgtgtgtgtgcaggtgagtatggcgtgtgctgggatatatttatgtgtacctctgtgtgagtgtgcaggcccatatgtgagtgtgcacacacatctgtgagagcctgcatgcatgtacacgtgtgaggtgttgatacatgtccatgtaggtatcagtttgcctgtaaatatctctgtgtaacaataacaaagtccgaatagtcatcaagagtatagacatgaagccagactgcctgggttaaatccccagctagttagtctttcggtgcctctgtttcttcctctgcaaaatggcgtctaccccatcaggattttaaaatcagttaatatggctgggcgcctgtaatcccagcactttgggaggctgaggcaggcggatcacaaggtcaggagatcgagaccatcctgcctaacatggagaattctgagaattgctcaaacccaggaggtggaggttgcggtgagcagagattgcaccactgcactccagcctgggcaacagagccagattccatctcaaaaaagaaaaacaaaaaacaaaaaaaccatgaactcattttcaggttgaggagctcagcatcctggttgtgaaataccctcctcataaaaccctgggatggagactacggggatcaggtgcttccttgtgacaacttctgggcatggtggctcagggcgcaaactggagtgtggccacaatacatactgtgtacttttacaaggatgtcacagagcctgggtatcataaaagaggagcttttcaaggaactgaaaccattagacaggagagagagccctgggcagacagggttgcccgtgccaaacatttcagctgtggcacaagggaaagggtgggagttatgaaactgttccattttgggtttaggtctgggctctgccgctagctagccaagtgaccttggccacttatctctgtggtcttccatgagtaaaaggcggaaactcactcctacccagagggcaggtctgactccctttaaccagcacccacctgctcacagcaggaaggactgaggtctaaagctggaggtgggcaggaaggactgaggtctaaagctggaggtgggcaggaaggaccaaggtctaaagttggaggtgggcaggaaggaccgaggtctaaagctggaggtggctgctcagagtcccagcagaggcctctggggcacctcactgagtgcctggcaggagtgggtgcctgtctcagggctgggttgagttgctcccaccaggacccttcgtcatctgcacagtgaggggactgggaggttcagagagtcacagcttgggctcaaaacaagcaagaggtttctgagtgtgaggattgctctggagtggaatggccctcacaggtaggagtgagcctcctgtagctagaggtatttaagcagctgaaggacaatccctgggcaggaagctgcagagatggtcgcagcgtggactagaactgctgttttggtcactcagacctcattccagcctggcttctctggacagcacccctgcaatagtgagctggtgactttacgcctcagaacctcggtttccacatctgtaaaatgggaattatatgacactcactatgtgccagacaccctgttggtacatagcacacactatctcacttaatccttcaagtagggacaagttatccccatcccttatatgaggaagctgaggcacagagaggtgaagtgaatggcccaaggtcacacagctgggaagacagggagctaaacttgaactctagtctggctgcccccagacctcacaccgcacctcccatgccgactccagccttccctgtgcccacagg

SEQ ID NO: 58 - DNA, 5952 bp, Homo Sapiens
atattcctgatttctatatgagtatatgcccgagtagcttggactacaggtgtgcagcaccacacccagctaacttttaaatttttgtgtagcgatgaagtctcactttattgcttaggctggtcttaaactcctgggctcgagcaatcctcccacataggcctcctaaagttctgggattacaggcatgagccacagcactcgagcaagatgatcttctaagacaggtgaagatgttagtgtctagaacttcaccttcaggggcacgtaggtatgaaaggtcatatctaagtgagtgtcatgtcagtccttctagaaactcagctgctccttttcaaatccagcctaataaaaggaggcttggagaatcaatgcacataagtcagaattatagaatgcacagtatgattactaggatggataacatgtggtctgaacaaacttctcatccattacactcagccctctcaggttaatggaactcagatcaagtatattcctgaagtcagtactgtgtgacgaacaggggtctggtggaagtgatgctaatagggctttaggccagctttagagcccttctctctctctcttttcgttttttgttttctttttgtttgttttttgttttttttttttagacagtttccctcttgttgctcaggctggagtgcaatggtgtgatctcggctcactgcaacctccgcctcccaggttcaagcaattctcctgtctcagcctcccgagtagctgggactacaggcgcccgccaccacagctggctaatttttgtatttttagtagagacaggggttttaggtcaggctggttttgaattcttgacctcaggtgatccgcccacctgggcctcccaaagtgctgggattacaggcatcagccactgcacctggctcaagaaacattcttaagcatgcttgatcttggtaaatgcccctgatttcttctgtaggaaaaaaccctagagatcgaatttctgtgtcaaagaataagtaaaattctaaggcttttgatacacatttctaagtttccaccagaaaaattataccaatgtatactcccacttgcaatgtatttaagtgcctacttccttgaatccttcctaacacaccaggtgttaacatgatttttattaatttggtaggttaaaattctgtctccattgaatttacatttctttgcttattaatgtggctaacaaacttcacgtttatgaagactaggactggacagtggaggccagatacctctggctttttgtttagatgaataaattttctatttctcttaatccattcaagttgagttctctgtcactgaaacctaaactatactaaccaatataatcctttgaggcatactgaagtcttaaaacttgtatggttattcattatgttttatgggtttttttcttatgtttggaagcccataggaagatctcataaatatttaccaaaatatttttccatttcttattgggtcaagatttgaatttgaattctttatctagaatttagtgaataattattaggaaaagtctttttttttttttttgagatggaggtttgctctgtcacccaggctggagtacagtggcgcaatcttggttcactgcaacctctgcctcccgggttcaagcaattctcctgcgtcagcctccctagtatctggaattacaggtgtgcaccaccacgcccagctaatttttgtatttttagtagagacggggtttcaccatgttggcctggctggtctcgaactcctgacctcagatgatccacctacctcagcctcccaaagttctgggattacaggcatgagccactgcgcccatccagaaaagtctacagcttttattcttttctaatagtttaaccaattatctgatcaaaatttacttcattctttctcccactgatccaatagtacctttactagatgttagagtagccacttaaaatgtaaattggatcacatcaaagatctgctgttgaccacattcccttgcacttttagagagcctacaaagtcctgcaagagctcaccccagcctctctgcaacctcaccttgcaccactcttgcttcagacacatcagtctgagttctacatcaaacttgtctgaatatattccaagtatgctgacctttataatcatgctattctctcagcctagaatgcttttttccaactctccaagcagctgtcttctctgataagatgctacctcctcagagaggccttctctgaccacagtcataggcatgtttatgtcctcatttcagtttaacataaaatttacgtaactgtacacctctttatcatttgacacttttaggaggacatcacttctgtaatagagcagaaataaacagattgatgtacatggtggatcccccatggatagagtttgtcatttaaaatgtcttcaaatctattacatgtaatttggcattaaaccaaaatgttattatgtaagcgaatgtttttaaagtctaaaagttcttttaaaacaaaatagacccgggcgcggtggctcatgcctgtaatcccagcactttgggaggccaaggcaggcagatcacatgaggtcaggagttcaagaccaacctggccaacatggcaaaaccccgtctctactaaaaatacaaaaattagccaggtgtgatggcgcatgcctgtaatcctagctattcaggaggctgaggcatgagaattgcttgaacccaggaggcggagattgcggttagccaagatcacaccactgcactccagcctgggtgatagagtgagactctgtctcagaaaaaaaaaaaagaaaaagaaaaagaaaaaaaaaaagaaattctaagtgataaagcattgtgtaacagtttgaggctgggcacagtggctcatgcctgtaatctcacactttgggagaccgattgggaagattgcttgagcccaggagttggagaccagccagagcgacatagtgggaccttctctctacaaaaacatttaaaaattagccaggtacagtggtgcacccctgtagtcccagctatttgggaggtggcaagaggatctctcgagcctagaagttggaggtggcagtgagtagtcatcttgccactgcactccagcctgggtgtcaaagggagactcccctctctagaaaataataaaaaaaaaagtttgacagttttcttgcttgtgctacataaaataatggtacatattacaattgaaggcatcttataatagaaatgccctttcctgttcccttttaaggctgacccagtgctttaagaggctgatacagaagggtaaagttaagtctccacaaaatccagggaagagactgtgaaactcatcttagaaccttgtatggagtcacagctgaactaggaaaaaaaaaaaaaaaaaaaaaaggaaagaaaggcattccagagataaagaatagactaaggagaggagatatttgaagccataatgattgagaatatgtcagacttgaaatgaatcttcagttccctcaacaagacaaataaaactaactccatacctagatacatggtagaaaaactaaagaattctgctgaccaaggtattaaaagtaactaaagagaagtggtgtgaagaaagcaagagagaaacaacaaatcctgtccatcctgtaacaattgaaaatttctggctgggcgtggtggctcacgcctgtaatcccagcactttgagaggccgaggcaggtggatcacctcaggtcaggtgttcaagaccagcctggccaacatggtgaaaccccgtctctactaaaaaaaaataataataataatacaaaaattagccgggggtggtggtaggcacctgtaatcccagatactcgggaggctgaggcaggagactcacttgaacctgggaggcggaggttgcaatgagctgagatcgcgccactgtactccagcctggatgacagagcaggactccatctcaaaaagaaaggaaaagaaaagaaaaaatattaaatgtgtacgctctttgactcagctgtattacttcaaggagttgatatcaccaaaattgcctaagtgctcaaaggtgtttgtagttaaacaacaggagattgataaattatgttatatacatgtgatgctatgttttaaagaggtactgatatgataaaagatgtacgtggcataaaattaaatgtactttattaagtacttttccaagtgtttacggaatgagtgcatttttgaaaaaaaaaaagtgtattcgaacttttaaaaaagctttaaaagctttatacaatgaacgattgagtgattataagagctggcgggggaatgttaagaggatgatagggagctaagtttaacagaacaattcacctctttatcttgtgacacctacgagcgcatcaattctgtaattgaaaaataaagtgcatatttgcagcagctgtactctcttcaggctgcaaggaggcttttcctcccggtaggcttgatttgcatttcactttcactttcgtggctggaaactttctacccacgtagtgggaggctgaggagccaccataaagctggggcttgacgagccgggaccgggacccgatctccacatatgcccggacttgttctgcggccgggttcaggagtcaaagaggcggggagacctgcgcgacgctgccccgccctgcgcccgcttcctccaatgtatgctctagggggcgggcctcgcggggagcatggacacgattggccctaaagtcttccccgcaaggccgtgggctggacagcgtggtgacgtcgcaacgcggcgcagggtgagagcgcgcgcttgcggacgcggcggcattaaacggttgcaggcgtagcagagtggtcgttgtctttctaggtctcagccggtcgtcgcgacgttcgcccgctcgctctgaggctcctgaagccgaaaccagctagactttcctccttcccgcctgcctgtagcggcgttgttgccactccgccaccatgttcgaggcgcgcctggtccagggctccatcctcaagaaaggtgttggaggcactcaaggacctcatcaacgaggcctgctgggatattagctccagcggtgtaaacctgcagagcatggactcgtcccacgtctctttggtgcagctcaccctgcggtctgagggcttcgacacctaccgctgcgaccgcaacctggccatgggcgtgaacctcaccaggtgagcctcgcggccccgggaagccggccccggcccgcctgcacctccggtgcttggcgggagcgctttcgagcctagccctcattggctggcgtgggccatccgcgccttctcattggcctgccacgcagtggggtggggcccagctgagcgcgcggttcggaaaagcccgcgctggctgctgcgcgaacctgctttttcgcgccaaagtcacaaagcgggtggtggcgggaaaatcaagggtttttccgcagtgccaggaacactgttccagggctctttgctcactaaatcctgttggccttgaatggacgctttagctgtggctttcttgtttctgagacggtctcggtgtgttgcccgggctggtctccaacttctgggctcaagcgatcctcccggctcagtcgcggttgactttaaatgctttataatgcccttgcgagaaatgtggcagcctgtcatcctacttagtggcaggagattgtttctatccagaagggacactgctggtggtattttagtataaatactgccagatgcgtcccaaaacgtctgcattaataatggcatcctccagcagtccgcttaccctccaccagttctgagacggcctgatgggtgagagtggtaaccccttctaaccgcgttcgaaatacagcccttcagcagacggcgttgattttaaagcatgtgtctcctgtcttctagt

SEQ ID NO: 59 - DNA, 6664 bp, Homo Sapiens
tattataagggcattaatcccattaatgagggaaaagccctcgaggtttaataatcacctcccgaaggccctacctcttaataccatcaccttggggtttaagttccaacatatgcatttaggaggggcacataccttcaaattatagcaatccgcaagtgatatacacttcaggccctatggaacctacacttacccttggccatatccagccacgtggatgtcccacagtacttcactatcaatatgcccaaagtgatgctccatgccccatagctgccccttagcatctctctagaacagcaggaccctcagcctgttgcaaagccacacacccaagtcatccctgatgactccttctcccttttttaacccagtcccagctcctaaaaatatctcattgtcatttcttcctcttgaaactgacatctccccaagttcagcacctgctgggactgttgcagagccctccattgtctgctggctctgatgctgcatcaccagccctcttcatgacttttcccccctaactcccacttatgaccatgtcactgccttgttcacatttttttgttcaagtccaacgtctaatccaaaacttttagcatgaccttgaacattaccttcaaggtatagatattatttaactacctagcctaatgtttatgacccttgctgagcacccagattctgtttatgttcagcgtactgaattaatttcagtctacaaacttgcattgttctttcttgtcaatggatcaagctctccaccttcatttgtcttcttggcaaactctttttattccttaagactcagttcagtcaactttgctatgaagccttgcctgatgccctctccactatgttctgcacacagcagtcttcaccatattgcattgtaaacatttgcaccccacctaggtggaagatccacagctactcacctgttatccttgatcctcattagtcccaaggttgacatatgaatctcttctccctacaccatgcccagtttctaaaattccaatgagagattaaggtgggttgacatgtatgcatttaaagtacaactaccaacaggtttaaagtgatctctttctctttttgtggggcgagaatgaagatagggggcatggaggttgtatatgacaaacttttattatctgtattttacactttggattatttcttaaaatttacagaaaaatcacattacttttataatcagaaaaacacccaactctgtcatagcaacgatagttcagtattttcacttgtggtgaaaagacctgaatctatatatcttgtattttctgtcactttcctttctgaattaacatgaaaaaggataaatcttcttcttttgcatacattttccggcaacttttaaattttttttttctttttatatatttgtctgtatagagacagggtcttactatgttgccaagctggcctcaaactcctggcctcaagggatcctccaccttggcctcccaaagtgctgggattacaggtgtgagccactgtgcctggccaatttttaccatttttatccagtagcaatggaggccttggcaagactgattcattcattcatttatttattcgttcatttttgggctagggtagtacattcacgtggctcaatattcaaaagatacaaaactctcctttccacctctgtaccaggtcactcttgtattccacagagggcacatttttattagtttcttccacctccttcccgaagtgtattttcttttcttttcttttttttttagaaggagtctcgctctatcactaggctggagtgcagtggcgccatctcggctcactgcaacattcgcctccagggttcaagcgattctcctgactcagcctcccgagtagctgggattacaggcatgtgccaccacgcccagctaatttttgtatttttagtagagatgggttttcaccacgttggccaggatggtctcgatctcctgacaacgtgatccacccgccttggcctcccagagtgctgagattataggcgtgagacaccgcgcccggcccggaggtgtattttcaagcaaatgttctcacatttttcttatctaaaaaaaacacttgtcttgacctgggctgccataacaaaatgccatagactacgtgccttaaacaacaaaattttattttcactcagttctggaggcttggtgtgcaagttcagagggcgggcaacatcaggttctggcaagggctgacttcctcactgacaggtgccttctcattctaacctcacatgagagcaaccaagctcttcagcgtctcttcttataagagcactaattccatcacgagggccccaccctcatgtcctcatctaaacctaattacctcccaaagcctcatctccaaacaccatcccagtggggtgaggccttcaacgtatgaattagcggggtggggggacaacaaacattcagaccatagaaatacgtaaatataagaaacaaaaccaaaaagacttatgtgcaataccaactgatcttttcttttccttccaaaatggagtttaccaaaatacaaatatgaagtttttcagagcacataccttcccctgctctcctctgcagtttttttttttttaataccacctctagggtagttttcctaaaatatggttccaaggctgtgtgtacctctcctgctcagatcctttggaacagtgttcagcgctcatcaggattctgactgtaaactcccttctctgactttaacatcacaggatgcagtactccctacattctaccatggggggcaccctgaattacctgggttgactttctggcctctgtgctctacttatacaatttcctctgtatggaaggcccactccagaatcctttccccagcctttgttcaaatgtcacttctgctagcattagcagtttcctcctctgggttctcacattgccctgtaacataagttacaaggtaagtaccagaagagaattcccaattatcatcctgctcccctaccctcaacacctccagcggtaactgtatcttattcatttttgtgtctatgaagcacagtgttgcactttggagatactacatagaagttggcccaaagggtaataaactgtatttgccaagatgatagcatggatttacaataacctctgaaactttataaagaaagatgattgagttaaattgatacacctagcatcacagctgtggaagcttgtggtcttctttatgttaaaggtaaaatggatataatgaattagttgccatttttagatgatatagaagttgaattcctcttaagcctctcaaagagaaagacatattaaaattcattaaaaccagtaccataaactgcacagaacagcctggttccctagagcacttctctggggcagtgagttttcatttaaaaaatgaagtttggattttaaacataagttttaaaagtgattaggctccagcaggagttcttaaattcctacctacaccatgactcccaaatgctctgcctctgttgcctaggaacaaaaattgtcaaggttgagccagatgcaatgtataacaccagatgatagatgcagctcattgtgttaaaaggtgttaaacacttaagtgcatgtgatatactctatatcacaagggtaaggaagttccattccatatcctgatttgggtcttctaatacatacttgtagtggatgtggtaatcagtctttgttctatgtcccattaggatcaatgcaaccagaaatccttaaaatggatttttattatgtctagctctgttttactgttctatttgtttattttaaaaagattttagaatggtgtttaggttgggctggtggctcacgcctgtaatctcagcactttgggaggccaaggcaggaggattgctggagcctaggagttggagaccagctagggcaacataaggagacattgtctccgcaaacaaacagaaaaaaaaaaagtaagaaagaaagagagaaagaaggaaagaacaagaaaaaggaaaaaaaaattaactgcagtaagtgcagaaatctctctcaaggatatgatggatggcaatgaagacagagtttttgacactggattatttaaagcataatttaagcctctttctctcccctcatagaattgtgaatttttgtgttttaattatatttaagccaggcgtggtggcgagtgcctgtagtcgcagctgcgctggaggctgaggccgattgcttgagcccaggatttggaggccagcatgcgcaacataatgagacccagtctctaaatgcatgcctctctctatatatttaaaattctgatgtgaaaatattttaaaatttaatacatttcaaatgtttttaattgtataataaacaaaatgtaaataataaaataatttaatattaaattcaaaaatgaggtagaaacaaagcacagcgatataaataataaattttcctttacatttttgaggcggtcttttgagttttccatttccttcttaaggtcactgaaatgtgctccttggagccagcccgcaaatcacgcatttagaaaaacataactatacactcctaaccctaagtattagaagtgaaagtaatggaatctcgatgtaaacacaatatcacttttttgatgagctattttgagtataataaatttgaactgtgccaatgctgggagaaaaaatttaaaagaagaacggagcgaacagtagcttcctgctccgctgactagaaacagtaggacgacactctcccgactggaggagagcgcttgcgctcgcactcagttggcgcccgccctcctgctttttctctagccgccctttcctctttctttcgcgctctagccacccgggaaggcctgcccagcgtagctgggctctgattggctgctttgaaagtctacgggctacccgattggtgaatccggggccctttagcgcggtgagtttgaaactgctcgcacttggcttcaaagctggctcttggaaattgagcggagagcgacgcggttgttgtagctgccgctgcggccgccgcggaataataagccgggtacagtggctggggtcagggtcgtgtctaggggacggccgagggcctcggagggcgagtattgaggaacggggtcctctaagaaggccggactggaggtcagggatctgcgcggggcccggctgggcctcggggggcggtgggcagggccttcgcctgggtctggccgtgtgagccacactgggctggctttagagggaggctatgggagcccagcctggcggggttaggcggcgtgggggtgggggttcggggctgcagtcatgagtcgaggtcggctgttctcaggaactgcctgaagaggctttcgggtcttgattgaagcaaaatccgctcccccacgctgagcgcctgcggagtagcaggctctttcctgggcccggcccctgcgcgccctgccatcccgcctcgggggtgggaaagtgggaccgcacctgggccaggtacaggcgcgggtccctagagccaggccgccctgagaaaccgatcctggaactcgtgggccttcttgggcttgctctgcccacggccccggcccacctggagctgttaagaacagtcagcccaggcacttaactctcatgagcagtgtagtgcagtttttttcatttaaaaagatacatctctgcttctttctggattgatttttctttgaagatgaatgtgagaaatagaacttaaaggtctattctgagtgtgctttataaatgattttatcatcagtgatgggtgttagaaaaatctaggtaattatgcctggagttctgacgtttcattggcaaacttcagaggaagtcttgaacttctggttgtcagcttttttttttaacccattcattgtgattcaagtataccgtttttctgcttagtccttgacattgtttaggttataattagaattttatctgtggaattgcacttttcattcttttgttttacggtgcttaagtgatatttcctactcttggaaaaagtaccttgaaagtcttgagcatgtttgtctgtgacctcagcaagcagaggaaaaagattaaaattgtcacgtgggcaactgtaaacacttaaaatgtttttgtcgttttaaacaaaattttcctaatgaacagtctgaacacattttagttctgtcctcataactttaaaaaataatgttttgaataaaattaggagtatcataaagcggtataaatttgttgaaatatttgggtataactttggcacacgcaggtactactttaaagtgtcacaaaaagggaacataattctggtttttgtttggaaagaatagacaagttgatacctgaatttgagggttattttgattggaagaagctaaatactacactagtatagaatatacacgtttccaatgtctcaggagtcaagaaggatggaaagttattgtaggagtccttacccttgtaaatattgtttgaatgtaattaatatttatggaatacttatgctgcagtaggcactgtggaaaatgctttacatatagtgtttcattaatgcttaaaactactcgagttagtggcatgtaattaagtcagtttttccttcactttagg

SEQ ID NO: 60 - DNA, 6815 bp, Homo Sapiens
ctgcttgcgaactaaaaattcagagctctcttgtgaatcatgctgccaagaattgcagacttaagcctcaagattgtacgaatttaaattttgactttatggcctcagttggcatgaagatacaaagataatcttctagcaaaaacagttttgaaagaccgggcgtgatggctcatgcctataatcccagcactttgggaggttgaggcgggtggatcacctgtggtcaggagttcaggaccagcctggccaacatggtgaaatcctgtctcaactaaacatacaaaaaaattagctgggtgtggtggcggacacctgtaatcccagctacttagggaggctgaggcaggagaatcgcttgaacccaggaggcagaggttgcagtgagccgagatcacaccagtgtactccagcctgggtgacaaaagtgaaactctgtctcaaaaaaaaaaaaaaatggtagaatgtcacatggaaagttaacttttagagatagtaatccagacacctataatattacattgtccttttaagtatctatatcaataaattaaccaacatttgttgacttaacatggccagggacagtgctgggttctcataattcccaagtaattctagccagaccttgtcctcaaggagcttatgagcagcatgaggagataaaaaacagataaataactctaattcaggaagaatttgataaatgcatgataactactactagaattcagaggagaggaaattttctttgaatagagactaaaggaaggaataatgaatgtggtagcatttgggctggacctattacaagaggcatgctttcccctgacaagccaagaaagtggggatttaaggtagaagaaaagaaaagccttgagttcttggagtattaaaattttgcttggctgaagcataggttacagtcggaggagatggactaggaaggatcgttatgggcagagaggaagccctgaactcatgggggaagctatgatttgggttaaagacagagctgggtcatgtcaagatggatcctgaagcagtaaaaaaaaatccaagaaagtaaacaggttgcagggtttaggatgaagtccgggaggaaagggcagagtggtccttaggaggccgttaggacaggtaaggtaatgggtctcaaagggagtggccgaaatgcaatggaaaaagagagattgtaaagctagaaggcttaggaattgcctcttgattaggtgtggaaggcaagggaaaatcagccctcgaagaagacagtgagattttaatctgggtggctggagagacagtgatgctgggcacagacacggggaagttgagaggaacaccatgtttgagaatggtgactcatatttgaacaagcctgcaatgcccagcagaccgctggaaaagtggggctggagacacattcaacggaggagccagatcaatctttacccttcttcacctgagagagccagtaagtcacggctggaacgtgtgtgtccagcaggagagggtagggagggaagccaagagagctgggagcccgagtgaagtttttgccaaaggcagaagaggaaagtcggcgtagcacagtatactttcccacccatgctcaccaagcccagggacaaggctcaccaagatgagtttggaagagaatgctggagagaaagtggttaagaaaactgcctttactgaacttcttgggctaactttgattgtaagtctctgaacaatcaaagcctgtgaggagacagctaaccttcttattcttcctatgtcaatagtgaacaattgcagatcccctttcctttccttctcctttcccctgttcctctctcctccctccctgaatactcttgcttttttctgggactggtctagagcatgggtggccattgttgacctacaggaggcaccactgtcaccaacaaagggtaacagtctttcttttcaatatttatttatatccagtatttattttcaatactgactatggagagagctctcctgtgctcaaacactgcaatactgggggtctttcaaagcacaaaaacatatatttgcatgatggcatcattaacatttttatggctttctatttcttttttgtactggtctcaagagccactcataaatctctcagtaactgcatagtgtcccagggccagagaccggccactcctggcattgtgattagagtcatttaatatccaaggtggtgactaatgtctggcaacaaagcctccattgggtgtcatgtgtcctgggaccctgagcgtgggcactctaggagcacctcagtattgcgtgttagtactatggccgagagaatagttgagaaagtggtcaagaggtggatccatgtgaacgccactgggaaatgagagacctcgttcccaatcacggtcagtgcaactcgaaagcctaaaatcagtttaaaacaaaggtatctacctttatcttatgttcatatcctaggcttttaataatacgtatttttcacatgtttacagaaagcagtcaactgagctattcatggaaaggtttgtgggtttggttaacgaagtggaggagtattacatttcagctggaaacacatccctagaatgccaaaacatttattccaaagtctggtttcctggtgcaatcggaggcatggcaatgcctctgttcagagactgggggctagggccagtaaggcatttgatccacatgtatcccagaaggcttttattgttaaattatattctttcggaaaaaccacccatgtcctattttgtaaacttgatatccatacacttttgactggcattctattttagccgtaagactatgattcacagcaagcctgtttttcctcttgcttggggtggcagcagaaagcatagggtactttccagcctccaagggtaggggcaaaggggctggggtttctcctccccagtacagctttctctggctgtgccacactgctccctgtgagcagacagcaagtctcccctcactccccactgccattcatccagcgctgtgcagtagcccagctgcgtgtctgccgggaggggctgccaagtgccctgcctactggctgcttcccgaatccctgccattccacgcacaaacacatccacacactctctctgcctagttcacacactgagccactcgcacatgcgagcacattccttccttccttctcactctctcggcccttgacttctacaagcccatggaacatttctggaaagacgttcttgatccagcagggtaggcttgttttgatttctctctctgtagctttagcattttgagaaagcaacttacctttctggctagtgtctgtatcctagcagggagatgaggattgctgttctccatgggggtatgtgtgtgtctcctttttctttcaggacttgtaggattctttgtgccatttgcatataatttggcaggttcacattttttaagagccctatgaagtgctttttgcatgtgttttaaaaaggcatttgaaaattgaaagtgtgatttatggaaattaaatcatctgtaaaaaattgctttggaaagtaatgattgctggccataaagggaaatatctgcgatgcacctaatgtgtttttaaccctttatttgctgacaatctatagtcattaatgctaaactcgattttggcttcagctacatttgcatattgtccaacaatggtctatttttgtaagaattagataaaatgtatacttgatataaaatagtcaaaaatgtaactcttagtaacagtaagcttggcatttagatagaccatgaacacttcgtcagatactctgttgggtgtttgggatagcaattaaaacaaagtattgatagttgtatcagagtctattaggctgcagcaaaggaagtttattcaaaagtataaactatccaagattatagacgcatgatatacttcacctattttttgtctccttaatatgtatatatatatatatatatatatatatacacatatatgtgtgtgtgtatgtgcgtgtgcatgtttaacttttaattcagttaaaaacttttttctatttgtttttcatctggatatttgattctgcatatcctagcccaagtgaaccgagaagatcgagttgtaggactaaaggatagacatgcagaaatgcattttaaaaatctgttagctggaccagaccgacaatgtaacataattgccaaagctttggttcgtgacctgaggttatgtttggtatgaaaaggtcacattttatattcagttttctgaagttttggttgcataaccaacctgtggaaggcatgaacacccatgtgcgccctaaccaaaggtttttctgaatcatccttcacatgagaattcctaatgggaccaagtacagtactgtggtccaacataaacacacaagtcaggctgagagaatctcagaaggttgtggaagggtctatctactttgggagcattttgcagaggaagaaactgaggtcctggcaggttgcattctcctgatggcaaaatgcagctcttcctatatgtataccctgaatctccgcccccttcccctcagatgccccctgtcagttcccccagctgctaaatatagctgtctgtggctggctgcgtatgcaaccgcacaccccattctatctgccctatctcggttacagtgtagtcctccccagggtcatcctatgtacacactacgtatttctagccaacgaggagggggaatcaaacagaaagagagacaaacagagatatatcggagtctggcacggggcacataaggcagcacattagagaaagccggcccctggatccgtctttcgcgtttattttaagcccagtcttccctgggccacctttagcagatcctcgtgcgcccccgccccctggccgtgaaactcagcctctatccagcagcgacgacaagtaaagtaaagttcagggaagctgctctttgggatcgctccaaatcgagttgtgcctggagtgatgtttaagccaatgtcagggcaaggcaacagtccctggccgtcctccagcacctttgtaatgcatatgagctcgggagaccagtacttaaagttggaggcccgggagcccaggagctggcggagggcgttcgtcctgggactgcacttgctcccgtcgggtcgcccggcttcaccggacccgcaggctcccggggcagggccggggccagagctcgcgtgtcggcgggacatgcgctgcgtcgcctctaacctcgggctgtgctctttttccaggtggcccgccggtttctgagccttctgccctgcggggacacggtctgcaccctgcccgcggccacggaccatgaccatgaccctccacaccaaagcatctgggatggccctactgcatcagatccaagggaacgagctggagcccctgaaccgtccgcagctcaagatccccctggagcggcccctgggcgaggtgtacctggacagcagcaagcccgccgtgtacaactaccccgagggcgccgcctacgagttcaacgccgcggccgccgccaacgcgcaggtctacggtcagaccggcctcccctacggccccgggtctgaggctgcggcgttcggctccaacggcctggggggtttccccccactcaacagcgtgtctccgagcccgctgatgctactgcacccgccgccgcagctgtcgcctttcctgcagccccacggccagcaggtgccctactacctggagaacgagcccagcggctacacggtgcgcgaggccggcccgccggcattctacaggtacccgcgcccgcgccgcccgtcggggtggccgccgcgcccggcaggagggagggagggagggagggagaagggagagcctagggagctgcgggagccgcgggacgcgcgacccgagggtgcgcgcagggagcccggggcgcgcggcccagcccgggggttctgcgtgcagcccgcgctgcgttcagagtcaagttctctcgccgggcagctgaaaaaaacgtactctccacccacttaccgtccgtgcgagaggcagacccgaaagcccgggcttcctaacaaaacacacgttggaaaaccagacaaagcagcagttatttgtgggggaaaacacctccaggcaaataaacacggggcgctttgagtcacttgggaaggtctcgctcttggcatttaaagttgggggtgtttggagttagcagagctcagcagagttttatttatccttttaatgtttttgtttaatgtgctccccaaatttcctttcatctagactatttgattggaaatatgtcagctatgatgatgactttctgggaagcgattcctgtcacccgctttcccctcctccccaccccacgtcctggggctttagagagcgattgggagttgaatgggtctgatttcggagttagctggctgagtccgcgctggagcggattgctggcatgtgacttctgacagccggaaatttgtaggtgtcccgcgagtttaaaacaagccatatggaagcacaagtgcttaaaaataatctcctgccagcccagtgacaagcctgtcccacccggggagaatgccccggagtggcgtgcgggtcagccagggtctgcgcctcgcagccactgtggaaggagcgcggccggtccaggacacaggagaccactttgtgacttcaatggcgaaggttgtgtgtcctcattttaatttttttccctacaagaattgttctttctccctctcctctccctcccattttctcttgcccagtttctcctttt

SEQ ID NO: 61 - DNA, 5527 bp, Homo Sapiens
ggcttcttgctgctgccaaattaacaactccagcccttgggtttagccacctgctgctgctaaaaatgttgctgagagtgatggagaggtgttttagttcccattttacagatcagaaaatcaaggcccagagaaactaagtagtcttggagataggagccatggcctctccacttgagttatcatcttgaaacatcaaggacaagccaactttatcaacagttttaggcctgtgagaaatgggcttggtttatcttgaagattgtaaacaaataaaaaaatagactgctccattactgatgagaaatatgagtcattctgccaggaattgaaagtacagctgcccataaaaaagctatgccggggtccagcctctccaggtccttgtgtgtgaaaaaccactcagtcaaagttccccttttatttctctttgtgctcagtaggatgctgaaatttctggaaaagacaatggaaatcaggggcaggaagagaacagtgtggggtgctaaacagatctcagcaacctccctgcccacggccatctctgcgcagacacctcgaccccccatgcgcaggtggagcagcgtttcctagttctttccagaggcttccttctgcctgccttccagccacatcgcctgagattgacaacgccctacagcaagacggaaacctccctttacagcaccaccttgcgattctgcagccacaaagttgagacttctgaacgtggcactcttctgttcccttactgtttcacgtgtacctgtgtcatctttcttgtttcatcgtaaacatacttctaaaattcccattttctttatttagaaatagaactacaagcggatggttaaacaatttaaacaaatggtccatggggaaaagtgaatttcacactgtcccccaaactttcagtgccttttatggagataattattgtttctaatgttttgaatattctttcagagatattttattcttatataagcatatgtgtatttgtgtccttccctcattttccccccacaaacactagcagactgttttgcaccttggttagctcatttaacatatcttggagccaggtgcggtggctcatgcctgtaatcccagcactttgggaggccgaggtgggcggatcacctgaggtcgggagttcgagaccagcctgaccaacgtggagaaaccccgtctctactaaaaatacaaaattagccaggcgtggtggcacatgcctgtaatctcagctactagggaggctgaggcaggagaatcgcttgaacctgggaggcggaggttgcggtgagccgagatcgtgccattgcactccagcctgggcaacagaacatatagatctgcttgatccttttcatgactgctacagctccattgaatgtatggatcatcagtgctccagctagcaccttagtgatgggcatttagggatcacaaacttcataagggcagaaacaatatcttacccatcctctgtttctgatatggtttggatgtgtgtccctgcccaaatcacacgtcaaggtaatcccccatgtcagaggtggggcctggtggaggtgattggatcatggggatggatccttcatgaatgggttagcaccatccctttggtgctgttcttgtgatagagctctcatgagatctggttgtttaaatgtgtgtggcacctccccactctcttggtcaagttcctgccatgtaagatgcttgcccttgctttgccttctgccatgaataaaagctctctgaggcttccccagaagcagatgccactatgcttcctgtacagcctgtggaactgtgagccaattaagcctcttttccttatgaattatccagtcttaggtatttctttgtaacagtgtgaggatgagctaatacagtttcctacactgtaacctaaggcaatgctttgcacaaagggatgaaccagattgcttagtaattaaaacacaaatacaaaccacaagcatatccattcatgaattgggggacagcttttatttgattctgagttctgatacctgctgctttgctttgttaaaaatgtgctagttctcattcagcttcctatcagtcatatcaccaaccaacatgtataacatgtacaatctgccaggtcaggaggaaacttatggatacaagaaatgtccctcccttctaggaaatgataatctgctttgggagagaaggcaggtactttttggcaaaagtgacataataaaataatcaaaaaaagatggatctttttttcttttttgagatggagtcacgctctgtcacccaggctggagtgcagtggcgcgatctcggctcactgcaacatccgcctcccaggttcaagcgattctcctgtctcaggctcccgagtagctgggactacaggcacccaccaccacgcccggctaatattttgtatttttagtagagacggggtttcactgtgttagccaggatggtctcgatctcctgaccttgtgatccgcctgcttcggcctcccaaagtgctgggattacaaacatgagccactgcaccaggcgaaaagatggattttttaaaaaaggtgttaggataatcaggtccccacctgcaagaaagtaaagttagaagcccacctcagaccatgcataccagcacaaaaatgtcaaatggcttaaagataaaatgttaaaacaagtctagaaaggtattaaaagaaaatatagaaaatacagcaccagcaaaaatttccctacacaagatgtaaaagccagaagtcataaaggaaaaggttgataaattagaatagataaaaatgtaaaacttttgtataatataagacacaaagaatgaatttaaagacatacaatgaaggttaggaagatgaagatgttttggcgatgagtggtggttacacatcagtattaatgtacttaatgttactgaactgtacacttaaaatgatgaaaatggtaatttttatgttatgtgtatttcatcacataaaaaaagacatgaaatgaatcggggaaaatatttgctacataactaagaatgaaggcccttaataaaatctgtaaaactatacacacttttaggaatgaatcaacaaataatttctatgaattagaaaaaagtgacaatccaactaaaaaatgaataagggatataagcaatgtgtttcacagaaaaaataaaaattgacaatgaagttatgaaaaaatgttcagtctccttagtaattgcacaaaacaaactaaaacaatgagacattacccctaagattagtaaatgttaaagaaaaataataattggtgagggtgtggggaagtgggcacttacacctatgtttggaaatataaattggtgcaaccttatagggagagcaatctcacaacattttccaaagacttacatgcacaaccctatggcagagaaatttattcctcttccaggattttttttccttcaaaaacagtgatgtggatgaaaaacacatgttcactactgcacagggtataacagctgaaaactggaaacgataatactcacattcccttcagtaggggaatggttaaataaattttacaagccatctggtagataccaggcatgagctaaaagttagggtccagttagagatggaaagcacaccagtaatttgaaagggaaaatgtaatatgaagaattattaactagtaaaagaaggctaactgctaaaggtacaagagcactcaagctgtctgcagtcagcaggccccggctggtgagcaggaagctgcccgctgggaggctgccaaagttccctgaaggtgagcaccactggttctacaagctgctggcagtcatggcgttaagagcaggaagagaagcaccagaacccggaagagaaatccagtcctctgctaggccttgcaccgtccctctggcgccctctactgacaaagccagtaaaattgtgccgctagcaaaggagatctttttatgggatgtagcttggtgtcaccaaagagaacagagtggacttggagctcagatgcaacacaatgattgatactggcacagtatacttaccctgcttttgtaaacaaaatggtatatgtgatgtctctctttgtctctctgtatataaaacaatatttgtttctacttattatgtatttatgtctttactctgcatgccaggagctaagtattttgcatgtattaactcattttgttctcataataaccttcacatgcaggaatcattatagctactttatgaatgagccgaggaaggcactgagacgttaagtaacttgcccaaggtcacgcagctagtaagtggcagagcaagaattactatggctttataagcctaggaaaaagtctgaaagaatcaaaatgttaacagcggggacctcaaggaagcattgaagaggccatgggagaagttttcactttgttaaaaaatcagtccttcaaataaataaatacagtgaggcttccccagaagcagatgtcactatgcttcctgtacagcctgtggaactgtgagccagttaaacctcttttctttataaattatccagtcttaggtatttctttataacagtgctaggatgagctgatacagtttcctacactgtaacctaaggcaatgctttgcacaaagggatgagccagattgcttagtaattaaaacgcaaatacaaaccacaagcatatccattcatgaattggggggctgctttgtgtgcatagataaggtatattttttaaaaaaattatttttccaagaagaaaataaaccagttaataaacgacaactcacagtgccaggaagtgagaaacaagtgtgtgataaacggtggagaatgggagcactctccgcagtgggcgggaggagacgaggagggcgttccctggggagtggcagtggttggagcaaaggtttggaggaggtaagtcatgtgctctgagtttttggtttctgtttcaccttgtgtctgagctggtctgaaggctggttgttcagactgagcttcctgcctgcctgtaccccgccaacagcttcagaagaaggtgactggtggctgcctgaggaataccagtgggcaagagaattagcatttctggagcatctgctgtctgtgagattaagcactatgtatattgctttattcactccccacagcaaccttaccaagcagttcttttccacgtgaaaagatggaggctgggtggagcaaaaggaggtatttagagtcctcagcaagtgagaggcagagctgggatttgaatccagatctgcctgatactgaagtctaggctggttccacctctccggactgctttccagggagtagaagacagatattttaccttagctggctgcttctagaagtctgaccctgctggctcaaaacgactttagttccttgcccagaggctgcgggctgcgggtcaagacatcagtagaaggagggcccagccagagaggctgacatgggcttctactcaccgtcatctctccttccttccagg

SEQ ID NO: 62 - DNA, 10224 bp, Homo Sapiens
agcccccacagccccagtaccgccctccccatcctaccccgactgcgtccctgctgtttatctttgcccacccacctcaaccccagtgctcttttcagtccttgggcctcaggtgacacaccagctagtgggacatgggcccccacaggcattctcagcccaacccagccccttccttttccttggccccctggccagcacctgcatcacactggcctccactggacacccttgcagcttcgggccttcctcacagacacactgctggaccagctgcccaacctggcccacttgcagagtttcctggcccatctgaccctaactgaaacccagcctcctaagaaggacctggtgttggaacaggtaggcactggaaagttagctgctcaggaccactgtcccactttaccagcaccttcctgccactctccacttctctctcctagatcccagaaatctgggagcggctggagcgagaaaacagaggcaagtggcaggcaattgccaagcaccagctccagcatgtgttcagcccctcagagcaggacctgcggctgcaggcgcgaaggtaaggcctgtggaaatggcagggagggtggaggggatgcaggaggcatggatgtgggtggggtgcccccaccttccagggccagtcagaccttcctgactttcccccaggtgggctgagacctacaggctggatgtgctagaggcagtggctccagagcggccccgctgtgcttactgcagtgcagaggcttctaagcgctgctcacgatgccagaatgagtggtattgctgcaggtgagggtatcctagaaccttggacctctaagccctactcccacatcccccacatgcattgccatcctcaatacccacctgcctgcagggagtgccaagtcaagcactgggaaaagcatggaaagacttgtgtcctggcagcccagggtgacagagccaaatgagggctgcagttgctgagggccgaccacccatgccaagggaatccacccagaatgcacccctgaacctcaagatcacggtccagcctctgccggagccccagtctccgcagtggagagcagagcgggcggtaaagctgctgaccgatctccctcctcctcaccccaagtgaaggctcgagacttcctgccccacccagtgggtaggccaagtgtgttgcttcagcaaaccggaccaggagggccagggccggatgtggggaccctcttcctctagcacagtaaagctggcctccagaaacacgggtatctccgcgtggtgctttgcggtcgccgtcgttgtggccgtccggggtggggtgtgaggaggggacgaaggagggaaggaagggcaaggcggggggggctctgcgagagcgcgcccagccccgccttcgggccccacagtccctgcacccaggtttccattgcgcggctctcctcagctccttcccgccgcccagtctggatcctgggggaggcgctgaagtcggggcccgccctgtggccccgcccggcccgcgcttgctagcgcccaaagccagcgaagcacgggcccaaccgggccatgtcgggggagcctgagctcattgagctgcgggagctggcacccgctgggcgcgctgggaagggccgcacccggctggagcgtgccaacgcgctgcgcatcgcgcggggcaccgcgtgcaaccccacacggcagctggtccctggccgtggccaccgcttccagcccgcggggcccgccacgcacacgtggtgcgacctctgtggcgacttcatctggggcgtcgtgcgcaaaggcctgcagtgcgcgcgtgagtagtggccccgcgcgcctacgagagcggaaggggcagccaaggggcagcgcagtcgccgcgggtcaagtcgcggcagagggggtcggcggggacagctcccgaggactaggtccgttactttcgccccatcgctgaagagtgcgcgaaaatggtttatcccttgtcgcactccactcgtatctgggccacagatgagcagaggtggctgcttatatgtaaaaatacgctgattttaagtttcttatctttaaaatgccttggcccttcttgagaaagggtttgtgcctactgtcctcggagtccatcttcccaggcttgcctcttctcaaacactcatgaccccctccagaacctttagggtgaagggaaattaccacctatgggagggagcctggaaaaatttagaacctttggtgggccccctgcaagcaggagttttgttgagtctttatttagcaaacacccttttctgacccagtgaatcagatgctaaaatatgcacgcagccacacacccagcagtccttctgcacccctgggaatcgccagcaagcaaaggttgctctcccctgggtagacaccagctggaatcaccaggggtgcttttacagtcctccccgctagcctggatcccaccgcagacctgttgaatcaactgctgggagtggaccctaggcatcagtaaattttaaaaactccccaaattattgtaacatggagtctgggttgagcatcactgctctggcctatttaggaacttgtggatggatagtgtcccaggtctgtgtgtgcatggagaccctctcatccggtacaagaggacatcacaaattcagctggggggagcacaaagttgtgacagaatgcaaagaatgaacaaggggccgagcgcggtggctcatgcctgtaatcccagcacttcggaaggcggaggcgggtggatcacctgaggtcaggagttcaagaccagcctggccaacatggtgaaacctcatgtctactaaaaaataaaaaaaaatgagccaggcgtagtggcgggtgcctgtaatcccagctactcgggaggctgaggtgggagaattgcttgaacacaggaggcggaggttgcagtgagccgagatcgtgccactgccctccagccttggcgacagagtgagactctgtctcaaaaaaaaaaaaaaaaaaaaaaagaacaaggctgggacattgcagcgttctcaaagagaaataaagtagccatggagataagaagcaggatgatttgggcatgtttatcagaggtagagacaagggagaaatcaaagataagtttgggcttttgtctccagtaactgggagcctagtggccatttttgctgcaaagaggaagctgggcaagtgtagcagtgaggctgaagaaaagggaattaaattttggccatgttcacttgaaacgtcttttagacatcctagtgaaggtactggcacggaggatctagtctgagggtttaggtcagtgtttcagccgtggatctggggcagatgaatgtagacagaccaggccagtgatcaggactgagcccagacttcatcgtgagatatggaagttgagtcagaatctgcaaaggagctgagcaggagctgcagggggtaggaggaaaactgggagagtgtagcccctgggagtcaaagggagcaagcttcaaatgatgctgagggggtgagaatggagaatggaacactggattccatttggtagtacacagatcgctgaggaccctgtcccgggcagtttcctggaggaagaggcaagcctggctggagtgggtagaggggagagtgaaggcgaaggattagagtgtatagagaccagtgtcttggtctgaggggagtagagacaggtgacaaccacagggcagacgtaggttaaaggtgtttagtttttccttcaagtaaatgggcagatgtattccatatacgttcccagtgaagggccgggtgcggtggctcaagcctgtagtcccagcactttggaaggccgaggcgggtggatcacctgagatcaggagtttgagaccagcctggctaacatggtgaaaccccgtctctactaaaaatacaaaaattagctgggcatggtggcgggcgcctgtaatcctaggtactcaggaggctgaggcagaagaatcgcttgaacccaggaggcggaggttgcggtgagccgaaatcgcgccattgcactccagcctgggtgacaaaagcaagacgcagttttttgttgttgtttttttaattgccaatgaggaaaggggaagttctgtgctaggcgatagagatccaactgttgagcaggcctctctgcctgtggccttccggccggtttccagacgcccaggtggccaacattagagtccgcgtagcagtgtgaggtaacccactgagataggtcgggcctgcggagcctggcgagcagcggccctctccctggggcttcccttcaatctccgggacatttccccgacctggagctcctccgcctcaccgccaggcctctctgcagattgcaagttcacctgccactaccgctgccgcgcgctcgtctgcctggactgttgcgggccccgggacctgggctgggaacccgcggtggagcgggacacgaacgtggtgagcgcggggccgagggcgtatgggaagggcgaggatgggcaggccacagtgcaggcattctcgagggctgcctgggtgccgcgcgcaaggagcgttctaattgccgatttcccggcggcacagagaggctaattctgcgcgggggctgggaggggagcctggattgccggctccgcaagtactccacccgctgcaagcggacccgggcccaggctgacccaggctccgcgcacgcgcacttcccgcaccttcccgccctcgcctccggccagaggccactcttgtgcgcttgcccggacgctggcacccgcccccgttccctgtggtaggtggggtctgtgagtggagctccggagcgatgaggtcattcctgggggcgaagcgtgcgtgtccccgccccggcgttcctgccccaatgagacaagagctagatcccggcgatctacgtttcagtcttaacggttgcggcgcggctctggcccgggcgcacgcgcacactgacacgcgtacacgcacgcacgcgaccggggcggtggttggcggctacggacgcgcaggactgggggacgggcgggtacggctatgggcgaggcggaggcgccttctttcgaaatgacctggagcagcacgacgagcagtggctactgcagccaagaggactcggactcggagctcgagcagtacttcaccgcgcgaacctcgctagctcgcaggccgcgccgggaccaggtgggagccagggggtgccggcgggcgggaggggaagcggtcgctggagctccgccctccccggtccgttgccgcgtcctgggtcggtgggcagccccaccctcctggctacgtggctccccgcgggtcctggccggggacctgcccgcggaaccgtgcgtaagaccccgattccaccgcctagatgctgggtgccggggcccccttggtttctgtcacagacaggttgaacacggaaaaagcagctgtatggcttgtggtagacctgagccgggcattatccagctatgactaaagccgaccgagcagtttggactagcacctcgatttccgcgttcgaatgctcctgctccctccttggggagactaggggaggatgtggagagggaagagtcctcgccaggaattgagaagtatgtttaggaaaacttgagaggcagagagagatcctgctcctccatctgcactcctgtatggagccagctgagccctcacctcttccctgttctggcctgtcaccagctgctggaatgtggaagattctgttcccttcctctagggtggatctggagaaagatttgggaatagataggaaagaagtcttgttttggaccataagcattcaggagcactttacccacaggaagggggaaagctagattataaaatgcctaaagaggtggaaaaagagatccaggttactaacccaggactgtaaggtgtctcggaacctcctaggtatccccattatcggagaactgtgtgccagatgccattggtgtgaccaccaggctcagagaaccaggcctaggcaccaggaaaaagaaacagggactgtgaagctcagtatgcctggcagaaatggggcggaaatccttatttaagtaaagaaagtggagttgtgagtgatgcttcagataaaattttacaaaattccttacaaaatgggtggtgctcagcacgccaaaatcttagcccagagcttgggtgcaagggttgagttgagtgtagacccctgggcttgtcttcatgtcagtcagtcctgagccattttccactgtggaaaggtgggaaaaccacaagacactaaccaattgaaaaggagggctagccacggaggtgcacacctgtaatcccagctacttgggagggtgaggcagaaggatcacttgaacctgggaggcagaggttgcagtgagccaagatcgtgccactgcactccagcctgagtgacagagtgagactctgtctcaaaaatagaaaaggaagccaagtacggtggctcacacctctaatgccaatgctttgggaggccaaggcaggtggatcatttgcaatcaggaattcgaggtcagcctggccaacatggtgaaaccctatctctactaaacatacaaaaattagccgggcatggtggtgtgtgactgtagtcccagctacttgggagactgaatcacttcaaccgggaggcaaaggttgcagtgagccaagatcgtgccactgcactccaacctgggtgacagggtgaggctctgtctcaaaaaaaagaaagaaggctgggcttggtgactcatgcctgtaatctcagcattttgggaggccaaggcaggcagatcacttgaggccaagagttcgagacctgccaggccaacatagcaaaaccccgtctgtactgaaaatacaaaaaaattatctggccatggtggtgtgtgcctgtaatcccagctactggggaggctgaggcaggagtatcacttgaacccagaagacagaggttgcagtgagtcgagactgggccactgcattccagcctggatgagagagcaagactctgtctcaaaaaaaaaaaaaaaaaaaaagaaagaataggaggctgagaagtcccaagttatatgttaaaaaaaaagaaaaaaacatcagttttaggccaggtgcagtggctcacacctttaatcccagcactttggaaagccgaggtgggtggatcatgaggtcaggagttcaagaccagcctggccaaaatggtgaaaccccgtctcgactaaaaatacaaaaaattagccagttgtggtggcaggcacctgtaatcccagctacttgggaggctgaagcagagaattgcttgaacccaggaggcagagattgcaatgagccaagatcgcaccactgcactccagcctggaaaacagagcgagactctgtctcaaaaaaaaaaccatcagtttttatggacagtggtagagtggagggtgggtccctatggtgcagaagggaaattccatggtcctgctgtgcatccgactgggatggctgttgaaatcctcttccagcaggcagctttggaaacagaaaaagaaactcttcctcctttagaatcctggaagggctgtgcagtgcctctaatccaagtctgttttctgagtgaagatagggaggttcatcaccagaagggaaggggctggaaatgaggtcactgcatcccagcccagggctcctgggtcatccaggaagggaagaaggagcaagctttctcattgttaggtaggagctcagagccatcacaagaacaagttagcaccatccctgtgccctccctgttctgcaaacaaaatgatcttccttcttgccctggcactagagtctgtctggcatttctcctgcccctagtactcctcccatctgggtacttcttcccgttggtgtactgaacaaacacatccactgctttattcacagcctccagccctcattttccagggcccacaccatttgtttttactaacccgacaaggttgcccactgtccccagtaaggtttgtactggggtttttactccagtgctcttctccatccaggagacctttggatacttggggaagaaaatgagcttaaattcccacccctccccctttacctttttcctgtaaggccctggccttagttcttagccccacatccttgctggctgcagaatagcagcgggttctgggtaaggagcattctgctaaaacgctccaccctgctccctcatctgtcctctccatttgtccccatcagatggtttaagtgcttaaggggactccagggcggagtcagggagaaccctggctctcctgggctaggcacaagatcattctacaggaaaccttgtgggaattcttctgggacaaagtattggtcagcgctgagcttagctgtgtctgtgacactcgcattctaactagggcctatctgacgtcaacaggaagtaaggctgatgcagtggggccaagggagtctgggagaagaaagtcggttcagagccctggctgccctgtcccacactccacccttccggcaagaatccagtccctagatgaggtggggagtgagtggtcgagttaaaaatctctgggtcgggtacgatggttcacgcctgtaatcccagcactttgggaggtgaaggcaggcggatcacttgaggtcaggagttcaagaccaacctggccaatgtggtgaaatcccatctctactaaaaatacaaaaattagccgggtgttgttgtggcacgcgcctgtagtcccagctactcgggagtctgaggcaggagaatcgcttgaacccaggaggcagaacttgcagtgagccaagatccagccactgcactacagcctgggcgacagagtgaggcttcgtctcaaaaaaaaaaaaaatctttgggccaaatctccagacagcacaggcaggtgcagaaacccaccaggaagctgcctgtgtacctctggcagattggagcctggcctaaagctgccttttatgcagcttgggtcaaggttaaacatcatgtcacagtgatttttctcactatgtgtgagacatggagaactggctccaagtactactctgtccactggtggctggactactgatgtgcaccactctccactcctctcaccctgcagtgggtcatggccccgtgccggggcagaggagaaaaatgggctgccttctccaggacaaaccctcactccaactcaactagggtgctgtgatcagaatgtgcaattgaggtgtgattttactgattttttttttttttgagaccgagtttcgctcttgttgcccaggctggagtgcgatggcacgatctcagttcactgcaacctccacctcccgagtttgagcaattctcctgcctcagcctcctaagtagctgggattacaggcatgtgccaccacgcctggctaattttgtatttttagtagagacggggtttctccatgttggtcaggctggtctcaaactcctgacctcaggtgatccacccgcctcggcctcccaaagtgctagaattacaggcgtgagccaacgtgcccagcctgtttttgttttttgtgttttgaagcagggtctcactcagttccccaggctggagtgcagtgacacgataatagcttactgtagctgcaatctcccgggctcaaacgatcctcccacctcagcctcctgaacagttgggactacaggcacaccaccacacctggctaatttttttttttctttttttagtagagatgaggtcttgctatgttgcccaagctggtctcaaactcctgaggatcaagtgatcctcctaccttagcctcccaaaatgctgggattgcagatgtgagccaccacacccagcctgattttactttaaatgagagtccctcttcagagtccctcagctgttcctggcccctggccatgtgccttcagttgcccctgcttctgtggtatccttaaggctacattcagtgctgaggccctaggcaggcagcagagagaagccaaatgattctgtctttcccttatccacccagagcatgcaaaaccaggagcagtggtgggttcagggtgggcaccagctatgtatatgtacatcagggacagggggccaaaggcagtcagtttccaaagactgccccagaggccatttttcagagaagccctgggttcctcaagggccctgtgtccatgctggcccatcttgcagg

SEQ ID NO: 63 - DNA, 11787 bp, Homo Sapiens
tgtgaaatactagccatgaagaaattttgacaataatatttcagtgcagaattgcatactagtaatagtatgcttggattttttcagatatgtggtattaatacatgtttggaattttaagtgtcagatcaagaagaaaaacttaagatataaagtggtgttttaataatttgagttttatcacttttaatgtcaagaaattattatacacataaactttatgtctgtaattttagatctattgttgcacaggatttctggcaattacaagtcagttgcatcaagtaaattctgatttacttggctggtggctttgtgaacgacaattaccctcaggcgggctcaatggaaggccggagaaggtattgtttgataagccatattctgctagctttagaaccttgagtgaatgctgctgctttgtcttgcctgtttctatattgtaaattggccatgagcttatttattacctttccctgttgtgaattttcagtaatatatcctactaaaagactccccttgacaaagtagacccccatgagttgaaatactcattgatcctaatgtccatttccagacagtcttgtacaggaatctccatgtttaaggacagttgattttggcaaattggattttttaaaaattagactacagaatttttgtttgcaatcttcttatttaaggaatacccagataatttggtttggagagaagattattaaattttcctccacataataggtctctcttatcaggtctgtaagggacaaatagtgaatactcatttgcaactatgtaattgtcctgtagagcaagtgcagccataagtggtaagaaatgaatgagtatggctgtgttccaattacaattattatggatggatatacttgtatttcctatgtcagatggaatcttgctctgttgcccaggctggagtgcagtgacgccatcttgattcactgcaacctccgcctcccaggttcaagcagttctgcctcagcctcccaagtagctgggactacaggcgcacggctaatttttgtatttttattagagacggggtttcaccatattggccaggctggtctcaaactcctgacctcgtgatctgcctgcatcaacctcccaaagtgctgggattgtaggcgtgagccaccgtgcctgacccaggactatatttaaatgatttataaatgtaaaaactattcctacactatagatttgactcaaggattgtagcttgctgtgcccctgccctctgaatgggacgtggtggtacagtagctgggattacagtcatacaccaccacgcccatccaattttgtatttttagtagagatggggtatcaccatgttcatcaggctgatcttgaactcctgacctcaggtgatctacccgcctcaacctcccaaagtgctgggattacaggcgtgagccactgtgctcggcctgtatttttatttttaaaccttagtatttctgaataacaacgggtagagaaacacccgcagtagctgtctacaatagagtgaaataaaaagcctgaggaactgtcaacagaaaaatgggtggccgtggggagcaccgggacctgcacttgcacacaatctagggcagcttctaatgagtctatgagttactcagggatctcattaaaatgagatcagccttgagtggggttttctttatagacttctgtcaccatattttgaagagcaagggtttagttgattttaagcaggtgtgtacccccctggacagtgcttgtagaaaaacagaactatacccatggatttcatgattatactgctagcttcttggttaaggggctgagttaggcattcattgcagatagaaacaaagcagatgcatgcttatcagtgagtactgagatatttagcatggttacctatgaattgaagtttggtctcttcttacccattaattgattatctttcattctaagcaagtatttcataccctgcatatcagtatatccctggatttcgtccttccacatggtttgacactttgaacatcagattacctaagagtgagacttaacccacttttaaattgttctcaaaattagggaaataaaagagaatgaaattgtggcaacttttttccctcctagttaccagatgtatgctactcatggtgggtcctggcttccctaaagataattggaagacttcattggattgatagagagaaactgcgtaatttcattttagcatgtcaagatgaagaaacggggggatttgcagacaggccaggagatatggcaagtaatatttctgacatatttctataaattatttcagcgtttgcattacttcatggttccatggatttccagggtggcattccgagtgttgctttgaaagcagtttttttttctatttattgtagagtgtatgaaggatatagaacaatcttacagaaatttcttgtcgcttgttgctaacaaaattagtatatggtaaaggtcaggtattcataatttgaagttaaagaagttttcattttgtgatctgtatataaattcttttttaaataggtggatccttttcataccttatttggaattgctggattgtcacttttgggagaagaacagattaaacctgttaatcctgtcttttgcatgcctgaagaagtgcttcagagagtgaatgttcagcctgagctagtgagctagattcattgaattgaaagttgcatagtatagttttgccattttaacatttctgtatttgaagtgcttatcgaatctaaaagtgactactgttaatattttgtatattgtgttaaattaattttaataaattatataattatacatattgtaaaataaagaccggtattttattttctgctttttattctgaagtcctgttattctgactacagttctttgtgtatacttctgtgtctgttatgttcaataactgagctaacataaaataactctaggtttctacttgatttttcccccatgtatacctttcatctgttctatagcaagttgatgtaaattggtttgtcaacaagaatgttaactgatgaaagtggatagaacccatacatgaattaaatgatgcacaaaataaatggctgttgaaatttggaaatgattgataggtttgaatatggttattctgaattggtcacagacttaggttaaatggcaatctaccatcttaaaatggggttgtgattcggactgtcctttttttttttttttttttttttttttttagcattttatatatcagaattacccaaagaaggagttgtcttcaaataaggaaacactaacgggtaagttgatggtcaccacagtatttttttgcacctgtctttttcttaaaaagctaaaatgggtacaatcactcttttttatttttttgtgacagaatctctgttgcccaggctggagcgcagcagcacgatctcagcttaactgcaacctccgtctgccgggtttaagcaattcagccgcagcctctcgagtagctgggactacagccgcacaccaccatgcccggctaatttttatgttactttagtacagacagggtttcaccatgctgaggagctggagaccagcctgaccttgtgatccacccacctcggcctcccaaagtgctgggattacaggcgtgagccaccacgcctggcctaaaatgagtacaatcactctaggggtttacagttttggtgaaagtgaggtattctctatttttaaattttattttttagagacagggtcttcctttcttccccaggctggggcatagtagtgcaatcacagctcactgtaaccttaaactcctgggctcaagcagtccttccacctcagcctcctgagtaccagggtctacaggtacctgccaccatgcccactatgcccagctgatttcttaattttggggacaggcactgtcttccccaggctggtctccggaggtgaagtaatcctctggcctcagtctcccaaagtactgggattacagggaggagccatcgtgcccgatctgaaaataaggttttttgatggaaattgagatttttctcaagtatgtttggaatgccctgtgcaataatcattccaagaacagagatgttcttaaggactgttgtcactgcatgtgggtaaaccgctgtgcataactggtttattgagatactcaacagtggcaggatttcagtagtggtgtaaattaatgtcttctaatagcttctgtatggcagtatccagataatttcgtcatgtttaatccatggatctctggtaagttggtactattggccttatttaaggaattttctaaaggtcaccactgcaaagctggagtttgaacttctagtgtgccattaactgatttatatgttagaaaccacagtactagaaattggtagatggggaattgttaactgagagatcttacccagtcagtctttccctgtttcctactctactatgcacacagccatgtgcatactatcttttgataatataactatctttcctatatttggtcacaagatcaaccttaggtgggttatgctgtgtgagcattacacgttctcattgtgtcaaaggcactgggtgtactgtgttgggtggtttctacatttaaagataagctagtgtgcttggacgtgtgggaaatgcatgtaacatttgcaataagggagattgggtgctgtgagaataatggggctaacaaatcgggtggtcattgatgggccttgcagagttctggtcagtctgatacctgcaggctgaggatgttccagtgaggttcatgtggaaagtgatgggtttgggaatggctggaagcagggtcatagacctgaagtacgtgaatccatgtggaaagctgagcctgcctgcgcctgcgcagtgcagcttagtgcgtcggcgcgcagttctcccgcccgtttcagcggcgcagcttctgtagttgggctactggaggggtcgctcagaaacctcatacttctcgggtcagggaaggtttgggaggatgctgaggcctgagatctcatcaacctcgccttctgccccggcggtttccccgtcgtcgggagaaacccgctcacctcagggtccccgctacaatttcggactccaggagactccacagagccgcccttcggtccaggtggtctctgcatccacctgtcctggcacgtcaggagctgcgggcgaccggagcagcagcagcagcagccttccctgccccgcgccaaactcccggccagctcaaggcaaggagtgattgggtggaggagtctccttgaggctagaggccggcagttcatggaggctcgggggcacgtgggtggtggttaccacagtgaagttgtgatttggttggggcgtgagatctgagtgccctgggaatttggtgagtctgggtgattagaagccttgacttttcaaattggttctattgcaagaccttgactgtggatggctcagttctgagaaaggctgaagtatcccatataacgtccctcacagtgtctgacaaatgacagtttgtgcgtgagtttgctgatagaagttgtgagctgatctttggctgctgaatttaattctccaaatcctgctaaggtgggataaaatagattaaattgaacatttcatctaattcagggaaaataatatgtttagtattaaaagagtgggctgggcggtggctgacgcctgtaatcccagcactttgggaaaccagggtgggcggatcacttgaggccgggagttccacaccagcctggccaacatggtgaacctcccacccccatcccctatctctactaaaagtacaaaaattatctgggtgtggtggcacgtgactgtggtcccagctactcaggaggttgaggtgggaggatggcgagtccgggaggtcgaggctgccgtgagctgagattgcgccactgcatttcagcctgggtgacacagtgagaccctgactcaaaacaaacaaacaaaaaagatgcatgtccttcaaatcatttattattttgttagtctctattcatgacaaagcatcaccatttttcacacacgattgcaacacaatggtaaagtaacaaataccaaatccaatggtcatttttcagttcatctcatgtgacctttctgctgtatttaatgttcttaatttctttatttttagaaacagagtctcgctatgctgcccatgctggtctcaaactcctggtctcaagtgctcctgcctcggtctgcccaagcattgggattacaggcatgagccactgctgcctggcctatgtttaatgttcttgactggtcttctcttaaactcttttaatttggcttccttgattccacttgcccctgtttttctgctacctcccagagaattgctgtgcccacctttgttcccaaattatgggcatgtcattaaagctttttttcctaggccacttctacctagatgtgactatctccacagctcagatctcatctacactccagacttacttcagactgtcttctgaagtttttattgatggactaatggatacctcaggctgactatatgattaattaaattcctctctgcactttttttttttttttgagacagagtcttgctctgttgcccaggctggagtgcagtggcatggtcatgactcactgcagcctcaaattcctgggctcaagcgatcctcccacctcagcctcccgagtagctgggaccaaggcatgtgcccctacagatggctaatttaaaaaatttttttgtagagacagtgttttcctacgttgcccagcctggtctcgaacttctaggctcaagcgatcctcctacctcagcctcccaaaatgctgggattacaggtgtgagccactgcacctagccctcaaactcttaagtgttcttccatccttgtagcttacttactgtaccaccagagttatgtggaaaatgatcttatcatgtcccttgccacttaaatcagtagacctgtatctgcaggtaaaagatcaaactctctagaaggatagccaaagcaattgggatcggtttctaatctttacagatttatccctcatcatttaatatttaccctgctttctaacaaaactgagctacttgcaattcctttaaagcaacatgaatgttcacattgtcagtctaatccctctcttcatcagatgcttggtcacccacttatttatcagtaatgataacattcactaatttatatgcacctactttgttctggcttcttactaggcagacggtatctttgatcctcacaataattttgcagagtagattttttttttgttcctgttttacagatagaaccaaggcccaaataggcgaacaaaggttcaaattatgttagcagctggggataataatctgtgctctcaatgaacttaaggttcagtagagaagacagacttaaaaatcaacaaatacacatttaagaaataactgtatttgaggtatttataatttttgaggtaggtataattaaagtatggggacaaaagtgggaaaagacatttcacagagtaagtgcaccttgaactggtcttcaagaataagtaggaagaagaatgccagccaaagggaaacagctggagcgcattcttgagaaaaacacgtgcaaaggcacagaagaatcatgtaaaactgctaataattttgcttggctagagcaggagagtgatctaggtagataaacttgaatgtagatatagttgtgagaattagatctgggagacaaatttaacccagagaccccccatattcaacaccaggtctctggttttggtgactggatagatggtagtagtattttctgattctgggaattttgtaggcaaagcaaattttagagggaagatgatgagctctgttatggacatgctgagtgtgaaaagcctgtgggatatccatatatttatattaagataattgaatataggaaactagagctaagaagagagaaacttgagggaaatatggatttgaaagttaccagtatgttgggaccacagcagagaatatgaagactatatagcaaaatagaggtcaaggaagtaggaggagaattaagacaagtgaatgagtttcaagaaagggtatatagtctaaaagtagtctgagaacaagaaacagccctctccatctccagtttccgcatctccagtttctggcaaccactctcttccttagctccctaaagcctagaaatgctaatggagcacattttatgctggttctacacacgtctttatgatagcacccctacaccctgtccacacctttgtaaatattctctttatcaaattatcccagtttgagtatatcattgattcctgctggaacccatataatgaagttatattttaccctatggtgagtatggggagacacataggaattgtaagaaagagagatactgatcagatttgcttttcagaaagattattggtgatgattcgaagaatagattagagaggtgtaatactggaagcaaggagaagaagaagtaggaaacttgcacaaggaccaaagaagatacaggcttaaaatgggctgggaggagtagagagggatttaaattttagtgatgttaaaaaaaaagaattctagcactcagtcactgagtgttagggttgatgaaggaagaattgagaatgtctcctaagcttatgacttgagtgacaagggacaagctggtacaattaaccatactggtaataaagaattaattttgagggaaagatagagttcacttttggacatttagaatgctgggaagatacctaaaggtttatgcccaagagatagatatagtgacctggagctacattgtctgatagaatattctgtgataatagaaacgtttcatacttatgctgtccgatgtggtaactagtagccgtatgtggcttttgagcatttgaaaatgttgctagtgtgactgaggaacagaatttaaattgtatttaattttgatttagttaaatactcacatatgctgctttattgaacaatgcaggtatagagctgagaacggtttttgcacttttgaaggattaaagaatcaagaatattttgtgatattaaaattatatgaaatttagaattcaatatgtagaaataaagccatttttaattgaaacatagccattctcatttatttatgtattatctatgactgcttttctatgatagtgtcagagctgagtaattgtgacagtgattatatggcccacaaaagcctaaaatatttgccatctggtcctttatttaaaagtttatgggctgggcatgatggctcatgcctataatcccagcactttgggaggctgaggtgggcagatcacctgaggccaggagttcatgaccagtctggccaacatgacaaaaccctgtctctattaaaaatacaaaaaaaaaatagccaggtgtggtgggcatgcctataatgccagctgcttgggaggctgaggcaggaggattgcttgaacctgggaggcagaggctgcagtgagctgagattgcgccattgcactctagcctgggcaacaagagtgaaactccatctcaaaaaaaaaaaaaaaaagtttatgctgaggcatggtggcttatgcttgtaatctcagtgctttgggaggctgaagtgggaggattgcttgaggccaggtgtttgagatcagcctgggcaatgtagcaagaccctgtctctataaaaaaaaaattagctgtgtgtggtgaggtgcacctatagtccatagttactcaagaggctgaagcaggaggttacttgagcccatgagcttgaggctgcagtgagctgtgatcacactactgcactccagtctgggcgacaaagagagaccttgtctttataagacagtaaaatagactgggcatggtggctcccgattataatcccagcattttgggaggctgagatgggaagatcacttgagcccaggagtttgagaccagcctgggcaacatggcaaaaccccatctctacaaaaatacaaaaaattagcctggcatggtggcatgagcctatagtcccagctactcgggagggtgaggtaggaggattgcttgagcccaggagttcaaggctgcatttagccaagatcacaccactgaattccagcctaagctacagaacgagagtctcacatacagacaaaaaggaaaaattaaaagtttagcaacccctggtttacagtttaaggagtcgttacagctatatacgaaggcttgagagttgtcagaaaatagatgttaatagaaacaaagaggagagatgagatgcctggagatgcataatgttgatttgtgagggaaagcttaaaagtatgaagccctggaggccaacagttaagaagcagaggaaaaaggagatggcaaaggaaactaaaagtggtttaaagagaattcaagatagagagttgtggaaatcaaagagaataggtgaacagagcccaaacattttaaaatttttttagaacttctatgtgccaagaggctatgctaggttgtttatgtacattatttaaaaattttatgacaatcctgtaaaataggtaatagcttacatcagtagataagtacctaaataaggaactgaagccaattgagtctaaaatgccatttgcataggggagagaaattcaatgaagaaattaacagaagaaggttaaaagaggtctaataattattatacaaatgaaacatatgtcttagtctgtattctgttgcttttaaaagaatacttgaaactgggtgattatcaagaaagaaaacatatttcttggaagtctggaggctgggaagtccaaggtcaaaggaggcacatttagtgagggtctttgtgctggtggagtctctgtagagtcctgtagtggtacagggcatcacatggagagggagctgagcatggtagctcaggtctctcatcctcttcttataaaaccaccagtcctactctcgtgataacccattaacctattaaatcatgaatggattaattcattcatgaaggcagagccctcatgccccatcacctcttaaaggccccacctctgtcctgccacacttcactggggattaaatttcaatgtaagtttcggaggggacagatattcataccttagcaacacatctggtatatttgaagattaaagggtaatttatgattttagccagagtagttgcagtgaacttgtagaggcaaaagctatattagcatatttttgtatatttatcaataatgtcattaattttgttataatctgtttattttcaaaaatcattttcacatgaaattttatagaaagtgaacatagtggttgggtgcggtgactcaggcctctaatcccagcactttgggaggccgaggcaggcagatcatgaggtcaggaattcgagaccagcccagccaacatggtgaaaccccatctctactaaaaatacaaaaattcaccaggcgtggtggcgggtgcctgtaatcccagctactcgggaggctgaggcaggaggatcacttgaacttgggaggtggacgttgcagtgagccgagatcatgccactacgctccagcctgggcgacaagagcaagactctgtctcaaaaaagaaaaaaagaaaaaaaaggaaagtgaacatggtataaattataatgactaatacatcattgcataattcaaatctttaagaattgactgttaatttttcaaatttagg

SEQ ID NO: 64 - DNA, 2455 bp, Homo Sapiens
ggagtgcaagaacacagaactaaaacagagcttgaaacttaaagaaagggagagacttgggggaggagtggggtggagtgacgtgatgtgctgctggaaaccagcagttggtggtttcctcttgtgcttcctcttctgtgggttttctcctgcttgtgggagggcctttttctctcctcccgacagaaaggctatctttggtgttcgttcccttgaactgtaacatcctgtaagggtatgattccatgcctctgtgtgggtgtgaattccctcatggtgaccctcaaaatctgcacacaggaccccttcccattgaggggaggggatcaaaacaactctacttctcagggtcctctcctgttccaactggtctgtgtccaagagaagccttaggtaaatggggccagcttgaagatcaaacaggtttggcagcctctcccggcctctcttttctctcctacagctttatagctacagctgccttgatatcaatattgactttggctggctggcatgactacccacagggtatcgtgccttaatttaccaggtgacaggcaacgctgccctctcctggaaccatccagcagagccagggctgtacccccaaatcctgcaacagaggtttccctccatctcacctccctgtccctgcatttctcctatctcagtagctcctctttccctctctgggcttctctttccactccctccccttcctgggcttggtaaactagtccctaatctcttcacaccccagattggaaggtgggtccctccctgacactccccagagctgtcaccaacctcctccaagtttctatagctccattgctcaacagatttgccaggggtaaccattaacccagcccttaactctgttcccccacctttcttgctggaggggattttccaattactggttagcacagctaggtcatctcacccccaccatctttcctaacttcttgggttggggggctggggaggaatctccccatctcagggtactaggaacaaagctggggaggatggtgcatttaaagggattatatatatatatatatatattttttttctttctccctcataaccccacccccgcaacacacacacacacacacacacacacacacacacacacacacacagacgcacaaataagctttatggagcagtgacttcattatgttcaccgctttgagtccaacccctggcccaaaataggcactaaatagttgccgaatgcatgaatgatagatacctctctgtcttcaggggtgtgtagaagtgcgaaggggtatgggcatgtcccagtaggggtgtgagtgttctgatcagaactacttctctctgccagaatttgatgtaattcgaatgcttccacctctgcttgaagggtttaaataataaattaggccctgtcgtgccattatgggggtggtcataccctgtacccaggaaacaggcacggtagggctgagacagaagtcctgcttgtttccgcttatttatttgaaacaccgctcatttaggtcttactttgtttgccaggcactgttctaagctctgtataaatattaactcagagggtacaaatattaacttaagagttgttgcaggaaaaaaaataagcgcctctggctctttaagtttggcctccccctcaaaacccccgcaacggtcccaaaccccttccagggactgggactacggaccctggtccgaccttctcgcgggcttcccactgcgccaatcaaatcccagaaacagtgagtgctagaggcccggctgctaagcaacggcagagggcgggaagtttgaacgttctggacccgccccgaaggcaaataggccaatcagcgtccagactcttcagctacggcagtccgcttctcctcctcgccctgtcggatctctaggctggatccgggcctctccaatcaacagcggctaggagggcggggcgcgtgcgcgcgcacctcgctcacgcgccggcgcgctccttttgcaggctcgtggcggtcggtcagcggggcgttctcccacctgtagcgactcaggttactgaaaaggcgggaaaacgctgcgatggcggcagctgggggaggaggaagataagcgcgtgaggctggggtcctggcgcgtggttggcagaggcagagacataagacgtgcacgactcgccccacagggccctcagaccccttccttccaaagggtaacctccgcgtgacaggaatgagggtggggcgcgtggagtttcccacaatctgtactttagttaaatacccgagaattcacctcctgtgtccacagctctccacgcccctcagccctgccccgcagccctgtagcagaagtacttagtgctttgcattctgcgcgccaccctaccccggcctcctctgtgaatcgttgcttccgaaccgccctcactttttgcatccgcaga

SEQ ID NO: 65 - DNA, 18 bp, Homo Sapiens
aatgctttcgtgatgctg

SEQ ID NO: 66 - DNA, 18 bp, Homo Sapiens
ttgcccagcggaccccag

SEQ ID NO: 67 - DNA, 18 bp, Homo Sapiens
aacctgcgaacgcttggg

SEQ ID NO: 68 - DNA, 18 bp, Homo Sapiens
gggcaacgccgaacccag

SEQ ID NO: 69 - DNA, 18 bp, Homo Sapiens
aaggaatccgtcttgtaa

SEQ ID NO: 70 - DNA, 18 bp, Homo Sapiens
ggagtccgcgggaccctc

SEQ ID NO: 71 - DNA, 18 bp, Homo Sapiens
aaagctctcggaggggct

SEQ ID NO: 72 - DNA, 18 bp, Homo Sapiens
tgccatcccggagggccc

SEQ ID NO: 73 - DNA, 18 bp, Homo Sapiens
tagactcggaggtaggca

SEQ ID NO: 74 - DNA, 18 bp, Homo Sapiens
ctcatttccgtgggtaaa

SEQ ID NO: 75 - DNA, 18 bp, Homo Sapiens
aagccacgggcttcactg

SEQ ID NO: 76 - DNA, 18 bp, Homo Sapiens
ataggctacgggctggag

SEQ ID NO: 77 - DNA, 18 bp, Homo Sapiens
gtggggctcggaggcaca

SEQ ID NO: 78 - DNA, 18 bp, Homo Sapiens
aagtaagtcgttgctgcc

SEQ ID NO: 79 - DNA, 18 bp, Homo Sapiens
agtgcatgcgcagaaggc

SEQ ID NO: 80 - DNA, 18 bp, Homo Sapiens
aggattccagggtattca

SEQ ID NO: 81 - DNA, 18 bp, Homo Sapiens
ggagtccccggcacacat

SEQ ID NO: 82 - DNA, 18 bp, Homo Sapiens
cagtggcgtcggaactgc

SEQ ID NO: 83 - DNA, 18 bp, Homo Sapiens
atttggctcgacctggac

SEQ ID NO: 84 - DNA, 18 bp, Homo Sapiens
agggaggccgttggcacc

SEQ ID NO: 85 - DNA, 18 bp, Homo Sapiens
taaaatctacagtcgggt

SEQ ID NO: 86 - DNA, 18 bp, Homo Sapiens
gctccgccgggcctgcgg

SEQ ID NO: 87 - DNA, 18 bp, Homo Sapiens
tacttgggcgggtgagtg

SEQ ID NO: 88 - DNA, 18 bp, Homo Sapiens
cctcttcatctacctcaa

SEQ ID NO: 89 - DNA, 18 bp, Homo Sapiens
gcccagccagcgggctcc

SEQ ID NO: 90 - DNA, 18 bp, Homo Sapiens
aaaaacccgcgagcttag

SEQ ID NO: 91 - DNA, 18 bp, Homo Sapiens
tgatgtggcgggactctt

SEQ ID NO: 92 - DNA, 18 bp, Homo Sapiens
ctaggtagcgggcagtag

SEQ ID NO: 93 - DNA, 18 bp, Homo Sapiens
taggtttctaaagaaact

SEQ ID NO: 94 - DNA, 18 bp, Homo Sapiens
accaggctcgtgccctag

SEQ ID NO: 95 - DNA, 18 bp, Homo Sapiens
tgccttctatgtgtgaga

SEQ ID NO: 96 - DNA, 18 bp, Homo Sapiens
agagctaccgctctgccc

SEQ ID NO: 97 - DNA, 18 bp, Homo Sapiens
tgccacaccggccagctg

SEQ ID NO: 98 - DNA, 18 bp, Homo Sapiens
tctgcacccggagttggg

SEQ ID NO: 99 - DNA, 18 bp, Homo Sapiens
aagatcttcggccagccc

SEQ ID NO: 100 - DNA, 18 bp, Homo Sapiens
tccaggtccgcaagccca

SEQ ID NO: 101 - DNA, 18 bp, Homo Sapiens
cacactggcgaaggccaa

SEQ ID NO: 102 - DNA, 18 bp, Homo Sapiens
tggaggcccgggagccca

SEQ ID NO: 103 - DNA, 18 bp, Homo Sapiens
ttaggccgaaaagacaac

SEQ ID NO: 104 - DNA, 18 bp, Homo Sapiens
gagcggccccggtgccgc

SEQ ID NO: 105 - DNA, 18 bp, Homo Sapiens
aatcaggccggacaggag

SEQ ID NO: 106 - DNA, 18 bp, Homo Sapiens
ctggtccgggaaaggcaa

SEQ ID NO: 107 - DNA, 18 bp, Homo Sapiens
acttgtcccgaccaatct

SEQ ID NO: 108 - DNA, 18 bp, Homo Sapiens
aatagttacggtcggagg

SEQ ID NO: 109 - DNA, 18 bp, Homo Sapiens
agggtcaccgcgtctatg

SEQ ID NO: 110 - DNA, 18 bp, Homo Sapiens
ggtggtgttggttggtga

SEQ ID NO: 111 - DNA, 18 bp, Homo Sapiens
actctgcgctcgcaccca

SEQ ID NO: 112 - DNA, 18 bp, Homo Sapiens
agttgctccgcagatact

SEQ ID NO: 113 - DNA, 18 bp, Homo Sapiens
tagcagcccgggtagggt

SEQ ID NO: 114 - DNA, 18 bp, Homo Sapiens
atccagctcgggggagga

SEQ ID NO: 115 - DNA, 18 bp, Homo Sapiens
ctgctccctccttgggga

SEQ ID NO: 116 - DNA, 18 bp, Homo Sapiens
ggagccttcggctgactg

SEQ ID NO: 117 - DNA, 18 bp, Homo Sapiens
tatgtacacgagcactgg

SEQ ID NO: 118 - DNA, 18 bp, Homo Sapiens
agcaggaccgggattctc

SEQ ID NO: 119 - DNA, 18 bp, Homo Sapiens
aagtgcccgcggctgccc

SEQ ID NO: 120 - DNA, 18 bp, Homo Sapiens
ggagtccggtcgggcccc

SEQ ID NO: 121 - DNA, 18 bp, Homo Sapiens
agtcatttcgtcacatgg

SEQ ID NO: 122 - DNA, 18 bp, Homo Sapiens
gtgtcagccgcctagggc

SEQ ID NO: 123 - DNA, 18 bp, Homo Sapiens
tcaagtgccggacttgtg

SEQ ID NO: 124 - DNA, 18 bp, Homo Sapiens
caaagaggcggggagacc

SEQ ID NO: 125 - DNA, 18 bp, Homo Sapiens
agtacttccgtttgagga

SEQ ID NO: 126 - DNA, 18 bp, Homo Sapiens
cagtgagacgaggctccc

SEQ ID NO: 127 - DNA, 18 bp, Homo Sapiens
ttataatgcgagggtctg

SEQ ID NO: 128 - DNA, 18 bp, Homo Sapiens
tcccagagcgctagggct

SEQ ID NO: 129 - DNA, 18 bp, Homo Sapiens
acatctggcggaaacctg

SEQ ID NO: 130 - DNA, 18 bp, Homo Sapiens
ctttgccacggtggtgga

SEQ ID NO: 131 - DNA, 18 bp, Homo Sapiens
agaggttgcgtcccagag

SEQ ID NO: 132 - DNA, 18 bp, Homo Sapiens
gctgcttccggctggtgc

SEQ ID NO: 133 - DNA, 2932 bp, Artificial Sequence
  chemically treated genomic DNA (Homo sapiens)
gttaagaataaaatatattaagataaggaaaatttgtagttaagaatagaaaaaaattatggttttgaagtatgagttatttaaagaaagtggaaatatttttagattatgtagtaaaaaataaagtgattttttttttttaaatttatgtaataaattgataggtaatatgtgaaagttatagaatgtagattagaggatataataaatttattttttttatgtttataagaagtaagaaaagttttgatgtgagttagtattgttttataattttgaattgtgtagattgtacgtatttttttttagtttgaagtaaatagtggataggaaaaaatattaaatgttggtagtaaatatggaaggaaattataattaatgtaatatgttaaaatatgttatgtttattttattaatttgaattaaaatgtaagaatttaaaatgttttggaaaaatacgggtattgatttgacgtttgaagttttaaaatattatatattttgaaatagtatttgtattttgaaatatttgtttttatatattttttaaaatttttttttttttttattttatttattattaaataaaggatgaatagatgtaatttagaaattgttaagtatgttgaagaaagattattgtagaaaaattttttttagtttttttaaaggtgttaggaagtagaaaggtgatatagaattggagaggtcggagtttttgtattaattgtattaaatgcgaatttcgagaaaattttttttaattacgttttgtagttatatggatatgaagatttatgtgaattttgaaagacgtgtttatataagttgaaatgtttttaatgatttagttgatgcgcgtttttttatttgttttttttagagaggtgtaacggaagttagaatattttttttggaaatttaatttgtttcgtagtttttcgaggaattagtatttagttaattcgggtcgggagtagttatttgtggtgaggttgattggttgggtaggaatagcgtcggggcgtgggttgagtatagtcgtttcgttttttttgttataggaagtttgagtttattcgagtagcggtttttttaagtttaaagaagtagaggtcgttgttcgttttttttaggtttttttattaaagtcggagtatttttttttaaaattttacgttttggtggtcgttttaaggagcgcgaggtaggggtacgtaaagttgggagttattatgggatagtttttaagtgttaggtttttagattttttgaatttggtttttacgggagaagggttttttgaggcgtggatagtgtgaagttttttggtaagtttatggggattaagtggggttagatttagatttaggagtttttggagtagcgtttaaatcgtagtggtattggattatgttgttcggagcgcgtatagttcgcgcggtgcggggatttgttttttgagttcgcgggcggtgggtgggaggaagtatcgttcgcggcgattggaatcgggagggagaatcgtattggcggcgggtaaagtttagaacgcgttgttagatttttaattttgttttcgtggagatgttggagatttcgcgtataggaaagtttttgtagtgtttatcgcggttagagtagttggggtattaacggcgggcgtttttttttattgttttttggtttcgacgggggattagaggttagttttatttttagcgcgtttgaggtttatgtatttggttaatgagttgcggtttttttttaggtcgggatggattttgaaggggatcgtaatggaggagtaaagaagaagaatttttttaaattgaataataaaaggtaattagtttgttttatttttatagtttatatagttgcgagatttgagtaatttatttttagtttttagttttgaaataaatgatatgttgttgtttttaattatttttaagaaacgtaagttagtttttggaattaatatttttgtttagagtagaagtttgttggttgagtggagtatagtatatgtattttttttgttttttttgtttttttttttaatgatatataatattttatatatttatgaaatggggtatatggaagcgttttttatatgttcggaatgtgtaatgattaagttcgggtatttgaaggatatattattttaggtatattttatttttatgtgttgataatattttaagttttttagttattttgaaatatataatatattgttaattgtagttattttcgtttgttatcgaatattggaatttatttgttttatttaatcgtttttagttatttattaatttttttttattttatttttttatttttttcggttttttttttttagttttggtgtgttttttttttagtttttttgttttagataggcggatgtttatatgtgtttttgttttatgaatttttgttttttaagtggtgttggtcgtttatacgtgagttatatgttgttggtgatttgttttgtggtttaggtttttgttttcggtaaatggttatgtaaatatcgcgtttgtggtttggttgatgagatagaaggttaaaagtatatttaggttgttaattggtaataaatatttgtatataatattggtaatgtaattatatagggaaaataattatttaaagtaaattttgattatggtgttttgtttttatagaatatttaaaattttattaaatagatttattgttagtagtaaattgtaaaatagattagtaagtttaataatattagaaattgtaatgtaaattataagataaattagttaaatatattaatattataagaaattaagttttttagtgtaagagaaaaaatataaatgtggaaattaaatatatttttaaaaataatgttaagtttgaattagaaattttaatatgaatt

SEQ ID NO: 134 - DNA, 2932 bp, Artificial Sequence
  chemically treated genomic DNA (Homo sapiens)
aatttatattgaaatttttaatttaaatttaatattatttttaaaaatgtatttgatttttatatttgtatttttttttttatattgaaaagtttggttttttataatattaatgtgtttagttaatttattttataatttatattatagtttttaatattattaaatttattagtttattttataatttattattaataatgaatttatttagtgaagttttaaatattttataaaggtagagtattatgattaaaatttattttaaataattattttttttatatgattatattattaatattatatatagatatttattgttagttaataatttaaatgtatttttgattttttgttttattagttaggttataaacgcgatgtttatatagttatttatcggaagtaagagtttggattatagagtagattattagtagtatatggtttacgtgtgggcgattaatattatttgaaaagtagaagtttataagatagaaatatatatgagtattcgtttgtttggggtaggaaagttgagaaagaggtatattaagattaagggaaagaggtcgggaagggtaaaaaggtgaaatgaaaagaggttggtgaatgattaagaacggttggataggataaataagttttaatgttcgatagtagacgagggtgattatagttagtaatatattgtatattttaaagtagttagaagatttaaaatgttattaatatatagaaatgaaatatatttaaggtgatgtattttttaaatattcggatttgattattatatatttcgggtatgtaaaaaacgtttttatgtattttattttataaatatgtaaaatattatgtattattaaaagaaagaataaaaaagatagggaaaatgtatatgttgtgttttatttagttaataaatttttgttttaagtagggatattgattttaaaggttagtttgcgttttttaaaaataattaaaaataataatatgttatttattttagagttggaggttagaaataaattatttaaatttcgtaattatgtaaattatgaaaatgaaataagttagttattttttattgtttagtttaaaaaagttttttttttttgtttttttattgcggttttttttaagatttatttcgatttgaagagaaatcgtagtttattagttaaatgtatgagttttaggcgcgttggaggtgagattaatttttagtttttcgtcgaagttagagagtagtaagagggagcgttcgtcgttgatgttttagttgttttggtcgcgatgggtattgtaggggtttttttgtgcgcggggtttttagtatttttacgaaggtagagttgggggtttggtagcgcgttttggattttgttcgtcgttagtgcgattttttttttcggttttagtcgtcgcggacgatgtttttttttatttatcgttcgcgggtttagagagtaggttttcgtatcgcgcgggttgtgcgcgtttcgggtaatatggtttagtgttattacggtttgggcgttgttttaggagtttttgagtttagatttaattttatttggtttttatggatttgttagaggattttatattatttacgttttaagaagtttttttttcgtgaagattaagtttaggaaatttgaaagtttgatatttgggaattgttttatagtagtttttagttttgcgtgtttttatttcgcgttttttggaacggttattaagacgtgaaattttggaagaagatatttcgattttagtggaaagatttaaaggaaacgaatagcggtttttgtttttttgagtttggaagagtcgttattcgaatgagtttaggttttttgtggtaaagagagcgaagcggttgtgtttagtttacgtttcggcgttgtttttgtttagttaattagttttattatagatgattgttttcggttcggattgattgaatgttgatttttcgagaaattgcgaaataggttgaatttttaggaggaatgttttggttttcgttgtatttttttagaaagggtaagtagagaaacgcgtattagttgaattattggggatattttaatttatgtagatacgttttttaaagtttatataagtttttatatttatataattataggacgtagttaagggaaattttttcgggattcgtatttaatatagttaatataaaaatttcgatttttttaattttgtattatttttttgttttttaatatttttgaaaaggttaggagaaatttttttgtagtggtttttttttagtatgtttgatagtttttgagttatatttgtttattttttatttgatgataaatggaatgaaagaaaaaggaagttttaaaaaatatatagagataggtattttaaggtataaatgttattttaaagtgtgtaatattttaaaattttagacgttagattaatgttcgtgtttttttagggtattttaaatttttatattttaatttaaattagtaaaataaatatagtatgttttagtatattatattagttgtaatttttttttatatttattgttaatatttaatatttttttttgtttattatttattttaaattgaggaaaagtacgtgtaatttgtataatttaaaattgtaaagtaatgttaatttatattagagttttttttattttttatgaatatagaggaaataggtttgttgtattttttagtttatattttatgatttttatatattatttattagtttattgtataagtttagaagaagaaaattattttgttttttattgtatagtttgaggatgtttttattttttttaaataatttatattttaaagttataatttttttttatttttgattataaattttttttattttgatatattttgtttttggt

SEQ ID NO: 135 - DNA, 7432 bp, Artificial Sequence
  chemically treated genomic DNA (Homo sapiens)
atttgaagttagagttatttagaggagaaagagttggaattgagaatttaaggaatgtttggaagtgatcgggttcgagtttatttaggaagaaatagaggttggagatatgagattgtgttgttatttttttttattaatttttgggttttattgaggttttattataagtttggttttgtagtttagtgattaggagaaattagatataagataataataatagtaatgattttttttttttttttgagacggagttttgttttttcgtttaggttggattgtagtggcgcgatttcggtttaatgtaagttttattttttaggtttacgttatttttttgttttagtttttcgagtagttaggattataggcgtttgttattacgtttggttaattttttatatttttagtagagatggggttttatcgtgttagttaagatggttttaattttttgatttcgtgattcgtttgtttcggttttttaaagtgttggggttataggtatgagttatcgcgtttggttaatagtaatgatttttgagtatttatattgttagtttttacggtaagagttttttttattttttgttttgttttgttttaagatagagttttgttttgttatttaggttggagtgtagtggtgtgatcgcggtttattgtagtttttatttttcgggtttaagttatttttttgttttagttttttaagtagttgggattataggtacgtattattatttttggttaatttttgtatttttagtagggatagggttttttattatgttggttaggttggttttaaatttttggttttatatgatttgtttatttcggttttttaaagtgttgggattataggcgtgagttattgcgtttttttttgtatttgtttaagtaatatattgaaatatgtattgtgttttttattttatggaggaggaaattgaggttagtaaatgaggttgttatgggaggtggagataggatttgaatttgttttagtgtaggaggtttaagagtttttgtttttttttagggtattgtgtgggagggtgagaaggagggaggtttatagaggtatgatttttgattgttattgttatttgggttttgttttttgaagtttttgttaagcggggaggtggtcgggggagggttttgttttgtgtagttttttttttttcggttcgtagagttgagtatagagggatagaggtacggaatttttagaaatgtttttttttagaaataggttttaggttttgtttgttttgtgtttttgcgtgttggttttggtttgtattgggggtgagaagaagtgggtggagggatgtggggtttatatttggtgggtgtgagtgtggttgtgtgttttgtggttttgtagttacgtgagatatgagtacggagtgtgtgcgttttatggcgtgcgtatgtatgtgcgtgtcggggagtgtgtgtgtcggtggttgagagtgaagtgtgaatgttatattggtataaattgggattatttgtgtgtgtgtacgtgcgtgcgtggaagtgggagtatgtagtcgtggtaaaaaagtgtatgtttgtgtgtatatgtgtatttgtgtgtatttgtttttttgtggggtatgtgtgtgtaaaatatttgagtgtgtggatatgtgtgagggggtgagtgtgtgttggtgtgtacgtttgtgttttgtatatgtatttttttttttttttttgagacggagttttattttgttatttaggttggagtgtagtggtagtagtggtgcgattttggtttattgtattattcgtttattcgttttaagggatttttttgttttagtttttagagtatttgggattatagatatacgttattatgtttggttattttttttttttgagacggagtttcgttttgttatttaggttggagtgtagtggcgtgattttggtttattgtaacgttcgtttttcgggtttacgttatttttttgttttagtttttcgagtagttgggattataggagtttattattacgtttggttaattttttgtatttttattagagacggggtttcgtcgtgttagttaggatggtttttatattttgatttcgtgattcgtttgtttcggttttttaaagtgttaggattataggcgtgagttattgcgtttggttaatgtttggttaatttttttatatttttggtagagatagggttttgttatgttgtttaggttggttttgaaattttgattttaggtgattcgttcgttttggttttttaaagtgttgggattataggtatgagttattacgttcggttatgtattttatgttaaaatgggattatattttagattagtattatttagtagaaatttaaatttttaatatagggttaggtacggtggtttatgtttgtaattttagtattttcggaggtcgaggcgggtggatcgtaaggttaggagatttgagattattttggttaatagatgggtaaaaatttatttttattaaaaatataaaaaattagttatgtatggtggtatgcgtttgtagttttagttattcgggaggttgaggtcggagaattatttgaattcgggaggtagaggttgtagtgagtcgagatcgcgttattgtattttaatttgggtgatagagcgagatttcgtttgaaaaaaaaaaaaaatttaatacgtatgtagataatgtgtaaggtattattttatgtgtatcgtatgtagtaatttttaatttttacgataattttgaggtagatattattatttcgttttataaaaggagaaatagttttggggagataggataagttatcggttaaggtatatagttagttatatgtggttttcgcgtgacggttggtttttgtaggcgaggttttgtttagatgcgtgggtagaaggtttggttcggaaagaggaattgatagtaaggttaagttaatgtttgtttttgggggtagaaagttattttttgttttttttttattgtttatagaggtagtttagatagggtgggggttataggagaacgaagggagaagggggtagtttttgggtagtaaaattaggtggtgaagggaggtattagaggatggtaattagagaggttattagaggggaattataggtagatagggtgataggagggattattgatataaggtgaagagatggtttagtcggacggggtggtttatatttgtaattttagtattttgggagttcgaggtgggtggattatttgaggttaggagttcgaggttttaatatggtaaaattttattttttttaaaaatataaaaattagtcgggtatgatggtagatgtttgtaatttttgttattcgggaggttgaggtaggaaaattgtttgaatttaggaggtggaggttgtaatgagacgagattatgatattgtattttattttgggtaatagagtaagagattgattttgttttataaaaaaaaagaaaaaagaaaaaaaaaaagagatggttgatggttaaagaggggttagcggttaggggatatataagggtaaaggtaggaggtaagaggattggtagggggttgtttttgggttatcgggagcgatataggatgagtatggagggaaagggagaaggggattttagggttttagtttatttaagttgttttttggttttatttagtatgttagttagaggtttaggaaggaattttgagttttttattaaagttaaagatgagtcgttggagtttggtgaggggtaggatgaaggagttgttggagatagtggtgaataggattagagacgggtggtaatggttttggtgagggtgtgttgggttgggtggtgggaggggatttttgggtttgagggaggaggggttggggtttggatttttgagttttagggaggaggaaagggtgggagtggggttgtgatttttaggtttgggaggagtggagggttagagttgagagtaggaatttttaggttatagagaggagcggataaatggggtagagaatatttggggagagttggggtttttattgtgatgtttttttttttgtaggagttcgagtatttttcggggttttatgtagatttattatgacgattatttgagggatttgggttcgtttattaaggtttggtttttcgaatttaaagatagttttttgaagaagatttatagtttgtgttttaggtttgtttgtggggataaggattagggttaaaatgtttataaaagttaggtgtggttgtggcgggtgtttgtagttttagttatttaggaggttgaggtaggatgatggtttgagtttaggagttcgagattagtttgggtaatatagcgagattttttgggggtaaaataaaaagaaaaaaaaaagtttatatttttttaataaataaagttttatttgtgtttttgtttggatttttttttagtgtggttagaaaaaaatttattttattgttttttaggaattaatgagtagaagaggtgatatttgatggggaaggaagagtagggaggtcgggaagggtattaaggaataatattttattgtgggtttgcggagaatgggggattttaaggcgtgttagttttaggagggtgagggtaggagcgtgggtggagttagtaggtttttatgatggtttttattgagagtttcgtttttgttttttataagttttgattttatttttagtgggtatttagtatttttaatttttttatagtttttaatttagtttttgtcggaggcgaatttttagagtgagggttttttgttatttgagagaaggttttttgtgacgtgattttgggggacgttattgttttttttgtttttatttatttttttcgtagttttgttggttaggattttggtttagataaaggatgggggttgtggttgtggagcggaagtgggttttaattattataaattttttttgtgttcgttcggagttggtgaggatagtttgttagagtttggtaagaaagggatttagggtgcggggataggggggcgttagtagggagagggtaaagatcgataaagtaggaattttaagaggtataatattagaagttcgtgttggaattatgattgtgtgtgtgtgtgtgtgtgtgtgtgtgtgtgtgtgtgtgtgtgagagagagagagagggagatggagtttcgttatgtagtttaggttagatttaaatttttgggtttaagtaatttttttgttttagtttttttagtagttgggattataggtgtattattatattttataaattatagaatttagaattgtagattatttgagtttttgtttagagttagggtggttgaggtggggaggattttttgagtttaggagtttgaggatgtagtgagttgtgattttgttatcgtgttttagtttgggtgatagagaaattttatttttaaaaaagagaaagaaaaagggataggtataatggtttatgtttgtaattttagtattttgggaggtcgaggcgggtggattatttgaggttaggagttcgatattagttttattagtatggtgaaatcgtatttatattaaaaatataaaaattggtcgggtgtggtagtatatgtttgtaattttagttattttagaggttgagataggagaattgtttgaatttaggaagcggaggttgtagtgagtttagatcgtgttattgtattttagtttgggtgatagagtaagatttagttttggcggaaaaaaagaatgaaaaaatttaaaaaattaaaaaagaattgtaggttgggcgtggtggtttatatttgtaatttaaacgttttgggaggttaaggtaaacggattatttgatgttaggagttggagattagtttggttaatatggtgaaatttcgtttttattaaaaatataaaaattagataggtatggtggtgtatgtttgtatttttagttatttaggaggttgaggtaggagaatcgttcgaattcggaagatagaggttgcggtgagttaaaattgcgttatcgtattttagtttgggcgagagaataagattttgttttggaaaaaaaaaaagaattgtagattatttgtttgtgtttttttttcggggattagattttattttttttttgtcgtatttttttattttttacgtgtggatgatgatattgtgttttgtgtatgtttttcgttattaaaagtgttttttttatagagtaggtgagaatttagtgaggagatgtagggatatgaggtttgatttagggtagagttttaaggtaatatatttgatttattgtaggtttttaatggtgtttgtagagtatttttttgtattgatttagttttagtaaagggtagaggttttgttgtgttttttgttgggtttagaattgtttaggtgtttaagaaagttttttaggttgggtttagtggtttatatttgtatttttagtattttggggaggtcgagatgggaggatcgtttgagtttaggagttttagattagtttgggtaataaaataagttttttatttttataaaagaataaaaattagtagttgggtatggtggtttatgtttgtaattttagtattttgggaggttaaggtaggtaaattatttgaggttaggagtttaagattagtttggttaatatggtgaaattttatttttattaaaaatataaaaattaggtggggtatagtggtttaagtttgtaattttagtattttgggaggttaaggtgggcggattacgaggttagaagttcgagattagtttggttagtatggtgaaattttatttttattaaaaatataaaatattagtcgggtatggtggtaggtgtttgtgattttagttttttgggaggttgaggtagaagaattgttagaattttggaggtagaggttgtagtgagtcgagaatacgttattgtattttagtttgggtgatagagcgagattttattttaaaaaatacgaaaataaaaattagtcgggtggtggcgggtgtttgtaattttagttattggggaggttgaggtaggagaattgtttgaatttgggaggtgggggttgtagtgagttaagattgtattattgtattttagtttgggtaatagagtgagattttattttaaaaaagaaaaaaataataattaaaatgttaaaattaggagtagaattatagaatgttggaaagtgaggtttaagaagggggttgtgtttaagtttatgtatgggaaatttgattgggatatcgagtttatatagagtaggattttagttttttttattagagtggggcgtgattataggaatagtcgtttttagttagtttgttatatgatatttttttaatgttttagg

SEQ ID NO: 136 - DNA, 7432 bp, Artificial Sequence
  chemically treated genomic DNA (Homo sapiens)
tttggaatattgagggggtgttatgtggtaggttgattggaggcggttgtttttgtggttacgttttattttggtgggggggattgagattttgttttgtgtgagttcggtgttttagttaagttttttatgtatggatttggatatagttttttttttgggttttattttttaatattttgtgattttatttttgattttaatattttaattattattttttttttttttgagatggaattttattttgttgtttaggttggagtgtagtggtgtaattttggtttattgtaatttttattttttaggtttaagtaatttttttgttttagtttttttagtagttgggattataggtattcgttattattcggttgatttttgttttcgtattttttgagatggagtttcgttttgttatttaggttggagtgtagtggcgtgttttcggtttattgtaatttttgtttttagggttttagtaatttttttgttttagttttttaaggagttggaattataagtatttgttattatgttcggttaatattttgtatttttagtagagatggggttttattatgttggttaggttggtttcgaatttttgatttcgtgattcgtttattttggttttttaaagtgttaggattataggtttgagttattgtgttttatttgatttttgtatttttagtagagatggggttttattatgttggttaggttggttttgaatttttaattttaagtgatttgtttgttttggttttttaaagtgttggaattataggtatgagttattatgtttagttgttaatttttatttttttgtagagatgggagatttgttttgttgtttaggttggtttggaatttttgggtttaagcgatttttttatttcggtttttttagggtgttgggagtataggtgtgagttattgagtttagtttagaaggtttttttgagtatttaaatagttttgggtttagtagggaatatagtaaagtttttgttttttgttaaggttgagttagtgtagggaggtgttttgtagatattattaaggatttatagtagattaaatgtgttattttagggttttgttttaagttagattttatgtttttgtatttttttattgagtttttatttgttttatgagagaggtatttttggtgacgaagaatatgtatagggtataatattattatttatacgtaggagatgaggaagtacggtagaaagagggtgagatttgattttcggagaaagaatataagtaaatggtttataattttttttttttttttaagataaggttttgttttttcgtttaggttggagtgcgatggcgtaattttggtttatcgtaatttttgtttttcgggttcgagcgatttttttgttttagttttttgagtaattggaaatataagtatgtattattatgtttgtttaatttttgtatttttagtagagacggggttttattatgttggttaggttggtttttaatttttgatattaagtgattcgtttgttttggttttttaaagcgtttggattataagtgtaagttattacgtttagtttatagtttttttttagttttttaaatttttttatttttttttttcgttaagattgagttttgttttgttatttaggttagagtatagtggtacgatttgggtttattgtaattttcgttttttgggtttaagtaatttttttgttttagtttttggaatagttgggattataggtatatgttattatattcggttaatttttgtatttttagtatagatgcggttttattatgttggtaaggttggtgtcgaatttttgattttaagtgatttattcgtttcggttttttagagtgttgggattataggtatgagttattgtatttattttttttttttttttttttttagaaatggggtttttttgttatttaggttggaatacggtggtaagattatagtttattgtatttttaaatttttgggtttaagggattttttttattttagttattttaattttaagtagaagtttaaatagtttatagttttaaattttgtgatttgtggagtgtggtggtgtatttgtagttttagttattggggaggttgaggtaggaggattgtttgagtttaggagtttgagtttagtttgggttatatagcgagattttattttttttttttttttttttatatatatatatatatatatatatatatatatatatatatatagttatggttttaatacgggtttttaatattgtgttttttaaaatttttgttttatcgatttttgttttttttttgttgacgtttttttgttttcgtattttgagttttttttttattagattttggtaggttgtttttattagtttcggacgggtatagagaggatttatagtggttgagatttattttcgttttatagttataatttttattttttgtttaggttaaagttttggttaatagaattgcggagggggtgggtggggatagaaagggtaatgacgttttttaaggttacgttatagggaatttttttttaagtgatagggaatttttattttgagaattcgttttcgatagaggttgggttgggggttgtggaggggttggaggtgttgggtgtttattgggaatggagttagagtttgtaggagataagggcgaagtttttagtgagggttattatggggatttgttgattttatttacgtttttgtttttatttttttgaaattgatacgttttgaagttttttatttttcgtaagtttataatagggtgttattttttgatatttttttcgatttttttatttttttttttttattaggtgttattttttttatttattgatttttgggaggtagtggggtgggtttttttttggttatattggggaaggatttagatagggatataggtgagattttatttattggagaagtatgaatttttttttttttttttgttttatttttaagagatttcgttgtgttgtttaggttggtttcgaatttttgggtttaagttattattttattttagttttttgagtagttgggattataggtattcgttataattatatttggtttttatgaatattttaattttggtttttgtttttatagataagtttggggtataggttgtgggttttttttaagaggttgtttttggattcgaggaattaggttttggtgagcggatttaggttttttaggtggtcgttatagtaggtttgtatgaagtttcggaaggtgttcgggtttttataggagagaggatattatagtggaggttttagttttttttaggtgttttttgttttatttattcgtttttttttgtgatttaggagtttttgtttttagttttaattttttattttttttagatttaggggttatagttttatttttattttttttttttttttgagatttaggggtttaggttttagtttttttttttttagatttaggagtttttttttattatttagtttagtatatttttattagaattattgttattcgtttttggttttgtttattattgtttttagtagtttttttattttgttttttattaggttttagcgatttatttttagttttggtggggggtttagggtttttttttgggtttttggttggtatgttaggtggaattagagggtaatttgggtaggttgggattttagaatttttttttttttttttttttatgtttattttgtgtcgttttcggtggtttaggggtagttttttgttagtttttttgttttttgtttttatttttatgtgttttttgatcgttaatttttttttaattattagttattttttttttttttttttttttttttttttttatgagatagagttagttttttgttttgttgtttagggtggagtgtagtgttatgatttcgttttattgtaatttttattttttggatttaggtaatttttttgttttagtttttcgagtagtagggattataggtatttgttattatgttcggttaatttttgtatttttagaagagatggggttttgttatgttggggtttcgaatttttgattttaagtgatttatttatttcgggtttttaaaatgttgggattatagatgtgagttatttcgttcggttgggttatttttttattttgtgttagtagttttttttgttattttgtttgtttgtggtttttttttaatggtttttttaattgttattttttgatgtttttttttattatttgattttgttgtttaggaattattttttttttttttcgtttttttgtgatttttattttgtttgagttatttttgtggatagtggagggagagtaggaggtgattttttgtttttaggggtagatattggtttagttttgttgttagttttttttttcgggttagattttttatttacgtatttggataaagtttcgtttatagagattagtcgttacgcgggggttatatgtagttagttgtgtgttttggtcggtgatttattttgtttttttaggattgtttttttttttgtagaacggggtaataatatttattttagggttatcgtgagaattaagagttattatatacgatgtatatggaatggtgttttgtatattgtttatatacgtgttaaatttttttttttttttagacggagtttcgttttgttatttaggttggaatgtagtggcgcgatttcggtttattgtaatttttgtttttcgggtttaagtgatttttcggttttagtttttcgagtagttgggattataggcgtatgttattatgtatggttaattttttgtatttttagtagagatgggtttttatttatttgttagttaggatgattttaaattttttgattttgcgatttattcgtttcggttttcgaaagtgttgggattataggtatgagttatcgtgtttggttttgtattaaaaatttaaatttttattggataatgttgatttagaatatgattttattttaatataaagtatatggtcgggcgtggtggtttatgtttgtaattttagtattttgggaggttaaggcgggcggattatttgaggttaggattttaagattagtttgggtaatatggtaaaattttgtttttattaaaaatataaaaaaattagttaggtattggttaggcgtagtggtttacgtttataattttagtattttggaaggtcgaggtaggcggattacgaggttaggatatggagattattttggttaatacggcgaaatttcgtttttagtaaaaatataaaaaattagttaggcgtggtggtgggtttttgtagttttagttattcgggaggttgaggtaggagaatggcgtgaattcgggaggcggacgttgtagtgagttaagattacgttattgtattttagtttgggtaatagagcgagatttcgttttaaaaaaaaaaaatagttaggtatggtggcgtgtgtttgtagttttaaatattttgaagattgaggtaggagaattttttgaaacgggtaggcggatgatgtagtgagttaagatcgtattattgttattattgtattttagtttgggtgatagagtgagatttcgttttaaaaaaaaaaaaaaaaatgtatatgtaaaatatagacgtatatattagtatatatttatttttttatatatgtttatatatttaaatattttgtatatatatattttatagagagataggtgtatataaatatatatatgtatatagatatgtatttttttattacgattgtatatttttatttttacgtacgtacgtgtatatatatagatgattttagtttgtattaatgtgatatttatattttatttttagttatcgatatatatatttttcgatacgtatatgtatacgtacgttatgaaacgtatatatttcgtatttatgttttacgtggttatagagttataggatatatagttatatttatatttattaggtgtgggttttatatttttttatttatttttttttatttttaatgtaggttaggattagtacgtagaggtatagggtaggtagggtttggagtttgtttttgaggagggatatttttgggggtttcgtgtttttgtttttttgtgtttaattttgcgggtcgggggaggggaggttgtatagagtagggttttttttcggttattttttcgtttggtagagattttagagagtagggtttaggtgatagtggtaattagaggttatgtttttgtgggttttttttttttttatttttttatatagtgttttgagagaagatagaggtttttgagttttttgtattgaggtaggtttaaattttgtttttattttttatgatagttttatttgttggttttagtttttttttttataaagtgggaggtatagtatatattttagtatattatttgaataaatataaagaaaggcgtagtggtttacgtttgtaattttagtattttgggaggtcgaggtgggtagattatatgaggttaggagtttgagattaatttggttaatatggtgaaaaattttgtttttattaaaaatataaaaattagttagaagtagtgatgcgtgtttgtaattttagttatttgggaggttgaggtaggagaatggtttgaattcgggaagtgaaggttgtagtgagtcgcgattatattattgtattttagtttgggtgatagagtaagattttgttttgaaataaaataaaataaaaaatgaagaaagtttttatcgtggagattggtaatataggtgtttaaagattattgttgttggttaggcgcggtggtttatgtttgtaattttaatattttgggaggtcgaggtaggcggattacgaggttaggagattgagattattttggttaatacggtgaaattttatttttattaaaaatatgaaaaattagttaggcgtggtggtaggcgtttgtagttttagttattcgggaggttgaggtaggagaatggcgtgaatttgggaggtggagtttgtattgagtcgagatcgcgttattgtagtttagtttgggcgaaagagtaagatttcgttttagaaaaaaaaaaaagattattgttgttattattattttgtgtttaattttttttagttattgggttgtagggttaggtttgtggtagggttttaatagggtttaagggttgatgagaggaaatagtaatatagttttatgtttttagtttttgtttttttttaggtgggttcgagttcgattatttttaagtattttttgagtttttaattttaatttttttttttttgggtgattttggttttagat

SEQ ID NO: 137 - DNA, 12423 bp, Artificial Sequence
  chemically treated genomic DNA (Homo sapiens)
tttatttgagttttttttgttgtagagaaagtttttttgtgattttatttttttttttaaatgttgggaaatgtttttgagttttgtttttgatatatatattttttttgggttgagggatggggattgggatatatgttttgggaagggtaggtgtagagtgatggggttgacggggtgggggaagtagggggaggagttgtttttttgaggtttttgggaatcggttgtgttaggtatttttagttttttagttaagtaatatagagagttaaaagaggttattagagataagaaggtttttatggggttattgtttgtgggggatgttagtagtggggaggagtgaagtaggaaggaatcgggagattggatggaattgttttttttatacggttatatatagttatatatggttattgggattagagttagttttgtttgggtagttaggtttttagtgtaagttattagtttatttggaggggattagtgtttcggttaataaggttagttggtttttttttagttggagtttatttaattttgttaggaagttagagagttggataagtggagtttagtttggggaggtggaagagagggaggatggagtatggtgaagtataggtggtttttttggtagttttagttttggttttggaatagtttgggtagtgtgttaattttttttgttattgtcgttttattgatttttatgaatgagttgcgaggtagttatttttagttttttatggataaatattcgaggtttagagagggtaagagatttgtttgcgattttttagtatttttgtttttttttggggttttgagggtataataaagatttttaaggtttttttttttcgtaggaggtttaggcgtagttgtgggggagggtgtttttggtgttttttgtttttgtagttagtttgttttttattcggtagttttttttttttttttgggatgagatgtgtacgcgatgatgggattttgtaaatgggttgggaagaaggagttatttttttaaagggttagtttttttaggagtgttcgaatttttaaagggggtagggttttatataaattttatttagaagtaggattataagagtttttgtagtatttttttttttttgttggttttttttgagtgtgtattttgttttattagcggaatatttgcgggttagggttattggagatagggttatatcgtttgggcggttatttaagtaattttattattttgagtattttttttttttatttgaaaggtggggggttatttatttagtttttagggttgttaaggtgattaaatgggataatggttgtattatttttgagtaaagggtattatagatgggaagattattttagtttcgtagggagttagatgggttgtgagggaggggtaaaggtagggttggagggggttggaggggttggttgagtagggtatatatggggggggtttttttttaaatttagaaaaatttttagttaggtttagtgtttttgttgagaaattgaggtttaaagaaaggaattttttgtttttttgtttttttttttttgtttgaggttatttatttatttaataattttgtgttcgatattagataaggttttagtgagtaaaatgaatatagtttttttgggaatatagagtttagatagggagatgattattttattattgtaaatataaatatataattttagtttgggttaagtgttgtgaagttttagatttgtgtttggttcggtgttgtattttaagtattttggtatttaagtggtattgaaatatttgttggaaagaaggttattttgaggaggtgatgttagagttgaggtttggagggttggagttaaataaagatggttttaggttttttttgttttttttgtaggttttgtttttgttttttttttggtatttaggttaagggtaagtattttcgattggttattagttttaatatgtcgagtatagggattagattttgttttgcgtggtcggttttttttaggttttgaatttagggaagtgtatgtggattttaatttatttagatggtgcgtttgtgtttgtttttttttcgggtatgttttagaatagagtttagtttagagtttaggggtggtcgggatgatggatgagggtgtggggtttgttgattattaggggatttgattattgggttgggttagtttttttgtttttatttttttttttgtaaagaaggggtgttgggcgtttttatttttcgcgttagtttcggggtttttattttggcgggaagggtaggtcgattcggtagattgcggtttttcgggagggaagaaggtgttagacgcgcggagtaattataaatagttttttttttttagaagacggtacggggtttaagatttaggcgtcgtatatttagaatgagagtagagattttcgttaggaaaaaaaggtatttaggggatttgtttattagtatgaaatgtaaatgagttcgttcggttttatttatataattttgtgtatggattcggcgaaagggtaattagggagacgacggcgtagtagttattttgttattttttttattttttttttttatcggtcggggcgggaattgagacgattttaattttttgcggtggcgggaggtgcgcgggggttgcgtgggtggtgtagttttaggagagtgaataacgtttaggggtgatggttttagtaaagtgaggggtggtgatggaggttattcgatttatttcgtcgttttttcgtagtggcgtaagcgttttaaaattttcggagagggaattgattgatttattaggtttcgtcgtgtttatttttcgtagatgttggggaagtgtttttcggcgtttaattttcgttgtttttttttttatcggcgtttagtatattcgcggcgtttcgttttcgggtatttatagttttttggagtggcgtcggcggtaggagagagttagagtcgattgagttttagaattcggggaggtaggcggggtaagggtcggggtttgcgcgtgcgtgtgtacgcgtggaaagtataaatttacgagggttcgttgtcggtagggttaaggtgagtgagtgaaggcggtagattcgcgaagttttagtttcgcggatattttttttttaagttatatagggatttaagagaaattgaggtacgaagttggggggtggcggtggtggggattttgaaggtcgagtcgataaagtttagttttgtgttttcgtttttttttatatattcgagatttttataggtttttttttaggggttttcgttttgtttcgtagttttttttggggattcgggttttgcggtttagcgcgatttgtttggggttacgtgtttaagtacgaagtttttgcgtggagtttacgttttttaaaaggtttttaggggtaaagggatgaagtttaggagcgttaatgtgaggttaggtttagcgggttagggttacgaggttagggtcgaagttttagaattgattcgggagtatgattaataagtttaagagatttgtggaggttacgtttagattatgtttattttagtttttttcgagtttcgttcgtttttttaagattgggtttttttagtttgaagttttatttttaggatatttagtttcgtttttttttttttttagtttcgtagttaagtttaattttagggtgggagattaattaggtggagatttgggatttcgttttgggattttttggtgataatttttattttcgtgtcgtttgtttttttttttttttaggttcgtttagagttgagtttcgtttttcggttgttgtttaaattaggggtcgtggataaaggatgtttggggtttgcggttttacgttaggatttcgcgtcgaatattttgatttttcgggttttttttaagggagttttaaagattttaatggttaataggaaagtgggttcggtttgggtagtagtttgattggttttagttttcgggagcggatttaggggtaaggggaggggagaggggcggttttgggttttggggtgggaatcggattttagttgtggttttttttttgcgttttcgttcgtattgttacggcggacggttaatgggcgcgcggttcggggtcggcggcgttcggcgattggttgcggggttgtttgggggcggggtcgaggtttgaagttgaagtgagggatttagttgtggtgtgcgcggggtttttcgtcgtcgttttcgttcgttcgtttcgcgtttcggtcggaggaggaggttgtggcgtcggcgatagttacggtagcggtagttatcgcggcggttgcggcggcggtattttcgtttttattttcgttcgggattgttttttattgttttttcgtttttttcggatagtgagttcgcggcggggcgggggaaggagtcgtttttattttttttaagtttatttttaaagagatttttttttttttttttcgtcgtttggcgcggagtcgggacgatgttgattttttagattcggttttagttgcgtcgcgggaagagggggcgttttttttcggattttcgtttttcgtcgttgttttttttttcgttcgttttttcggggcggtttcgtcgaaggtagcgtcgaattcggtaatcggagtttgggcgcgaagcgaagaagtcggaataaagtgagggggagtcggtcggttggttcgggaagttttaggggcgtaggggaagcgggattcgcgtcgggcggggtttttttgcgtttcggcgtttcgcgggtagtatgtttttgcgggtagggggagttgggttgaattggttttttcgggggtttagtttgcgttttagagtttattagatgtgttttcgtcggggttttcgggttgcgtgaggatattttttttgaggggcgtcgtttgttttttttcggatcgttcggggtttcggttggttagaggatggacgaggaggaggatggagcgggcgtcgaggagtcgggatagtttcggagttttatgcggtttaacgatttgtcgggggtcgggggcggtcggggtcggggttagtagaaaaggattcgggtagcgcggatttcgaggcggaggggttgtcgtattcggcgttggtttcggtggtttttttttatttgagttaggatagtcgttcgcggagttggtgttttcgtacggtttgtaatttatatttttcggggtacgacggttaggcgcggggttagaagggggacgggtcgtatcgtcgggggtcgggggggaagaagatttatcgttaggtgagtcgaagtgagttcggagggtaggcggatggggggggggttgttagggaggggagggggtattagagtgggagcggagacgcgagtaggtttcgtcggtaattcgggtttattttatttgcgtatatatattttagtttttttgggttgggggggtggggatttaggttaggagaagagagttgtgtttcgttggttcgtagttggacgttttttagatgtggttaggggagggtcgttattttttagatgtgggaagtttcgggagtttgggagttgtattttgttcgcgtcggttagcgagttgggtttggttttcgagtttggtggggggtgggtgggggcggtggggaggaagttgcggggacggaggaggggggatcgtaattttttgggtttttttttttttttcgttttaaagtttgcggcggattttagggtttgattttttaatttggtttttgaggttgaggtttttattgatttagaaggagatgttggggggcggggattaggttttggtttattttattttttatttcgcgggttggaggtataataaggagatttcggcggcggttgatgttaggggcgtagaatgagaataagatgtggtggaggggagttgtttgttttcggagttgggagtggagttttttttcgttagagtttagtgtcgcgggtgttttttattcgatttttattcgatgtagggtgtttaagattgggttggggagttttatgttggattttttttgtggagggaaagattgtgttaagagtttttttagtaagtgggggatggggttaagttggtttaggttatttttttttttttataaataaagagtgtttttgtagattaggtatgggggattgtaggttcgcgaaagttttgaggggatagtaatattgttagtgtgtttattaaggaggattcgggtttattattttagcgtagatttcgtagataggtttggggaatgtaagttttatattttagggagatggatttagtattgttttttgtttgtttaggttggagtggtaggggagattttagtttagttagattttagtttaaagcgttatttgatagacgtttggttttaagttttttggcgggttttgttatcgggggaaggaaaggtggaggggaggtgttgttgttattttaggtttggatagtttttttgggttttttttttttagtttagaggtttttatagatttagggtgggagattttaggttttttttgtagtttttgtgagtttagtagggattttgttttggggaaggggggtggaaggttggtgtcgtttttattttttgtagttttgttgtttttagtgcgtaaagtagggatgagtttgtggtttttttatttttattttttatattttgtgggtttttaggaagttttttttattatattttttttttatttattgttttttttttttttttttttgagttgtagaaagagaggtgtaggttttagaggtttgtgtttttgttgaataggtataattttgaggtttgagtttttagttttaggttttttttttttaggtagggatggagatggagaattgatatggttggaaaggatgggtttcgagtaatttttttttttgtttttaattatttattttttttacgaatgggaaaaagtattaatttttatgtttttttttttaagggttttaggggaggtagagagagttttttttttttttttttttgaaaatagatttttaggttagtattttttttcgtttgttttatttttaggtgttagtggagggtttggaggtagatttttttattgagtggtttggacgggggtaagtgttgaggtttggtatgggggaggagaggtgggaggatagtatttattttgggagttggggagtagttttttttaggggagtggtagttgggtgtgtggtattagtattattaggtttggagaagtttgggttggttgaggatgggttgagaataattttttggtaggggattgtttaagttgtgttttttattattgttattttatttaagtattaagagatatttgtatttttgttgttagaggggttttgaattgtttttagggtttttttttttttttttgtggtatttgtgattttttataggttttaggagggtttttgtacgtttttgagtcggagggatataaggatatttttttttatttttaattaattgaagttagttaggttttttttggtatattttgttttttggttttttttttttaagggattaggttttttagagaggagatttagatttaggtaggaagtgtgtgtgtgtgtgtgtgtgtgtgtgtgtgtgtgtgtgtgtgtgtgtgttgtaagggaggatagtaaaaggtttagaagtgtaagttttggtgtggagagtaggggtattggtagatagttatttttgttttagattagaggggagtatgttggtttttttagtatgtgtttttgtaagtgtgagggagcgcgtttttttttcggggaggagttttttcgtattttttttttggttgttgtgttatatttggaagtttgtgtaggagtttttttaagtttagagtttagtatagtttttttttatttggaaattataggttggtatttgggatgtcgagagagggggagtgggaggggggttagagggggaagaggggagtttgttaggagtcgggggaggagaggggggggaggtttgaacggtaggagttttaatggtttttagaagtgagtgtgagtgagtgattgtgcgttattttgtgtgtttgagtgtgtttttttagaggggtgggggtataggagtttttggagttttttttgttatattgttttaatgttttaagtttgtttattttttttatttagggagaattttttatttttgtttttagaggaaatggtggggggagtgttttttttgtttttttattaatttttttttttaatttaatttttaaattttaagtttattagaggagattttggggagaagggttggggttggagaattgaatgggattgagggggggttagattattttttggtatgttttttgttttaggtttattttttttttgggttatatatatatttttttttattcgttttgttttatcgttttgttgggggattttttattattcgtagtgttagttggagttatttttgggattatttttattatatagttttttttattttcgtttgttttcgtttagtatttatttcgttttgtttgttttagttaggatggcgatagatataattgtttatacgtagatatgcgtacgcgcgcgtatatatatacgtatatatatatatagagttatagacgtttgaattagatttttggtttatttttttttttaaagattttagcgggtcgttttttttgtgtttttgtgttttatgtttttgtttttgggtggagtcggttgtttttttgtgagttttagtttttaatttagttggaagtttttttttttttatatttatgtattgaagcgtggtgaggggggaattatagggaaataggtttgtggggtgaggggggggggttttgttgggggaatttttttttgagttttggagtagggcggagtttttatattttatgttattttaggggttgtcgaattcgatagatattaggagtttttttgtgggatgggtgaggtaaggatttatttttttatttttttatttattagaaggttaggatttttgggtttaggtttattttttttttaacgttttttagttttatatttttaggtttttaggtgggaatggggtcgttggagggtttgtttgtttttttagtttatgtttagagtttttgtgtttttagaggtgttttagttattttttttttttttttattttttttatttttgcggttgttaggttaagtaagggttttatttagataaagttttatatagaggatttatttgtggagataatatgttttagtttttttttttaggagggaggaaaggaggagggatggaagtggggtttttttttttgtcgttttttttttttttgtttttgatggtgggttgtggggagaagaaagattttttttttttttattttttttttgggatttattttagttcggatagttattatagtaatagtagatatgtgattgtataggttttttatagttattatggtaattagtgtttttcgtttttttggttattatggggatttgttatatggtttttttttaatttgataatttgtgggtttttttgattttttttttttgtataaggataagataatagttttagttaggggagattatgtgagaggggtttttttaattattatgataataaatttatattatttggtgatatatttttttgtcgttatggtaatagaagaatattatatagtgatatattgttatgtttttaaggaaataagttttattttgagaagggtgaaagatttttttttttattaattatttttttatttagagtgttttaaattgtcgtgtgttttggttttttttttgttcgtttatgtttacgtgtcgtggaaggagagttgtatagggtgggtaggatgttatttggaagtaggttgaattgttaagggatttttaagaaggggttgatatgattaagagttgtgtatgaggttattcgggggtaggttttgtttgtaagaggtttttagtttgagtttgggtaaggtggggatagaaagaggggtaatttttttgtgaggttatttttgtatttttttttagttataagtagtttatttttgttaagggaaataaggtaggaagatttgaatggggatatatatttggtttttaggtagggagatttattgattggttgattcgtttatttatttatttagtttttttaggtattgattatttgtttcgtgttaggtattatagtaagtttcgtaggggatttaaagacgtattagaatgtttttgtttgttaggagttttagtttagtaggggaggtcgataagtgtatagattattaatacggtggaattttgttattagaggggtttaagtagatgttttgggagttttttttttttagagatttattgtttttatatagagatatttatttattggggttttttttagatttttttttttttgtagaggagaggaggggatttgtatggggaaagtagattagtttttgagggtaattgtgtttttttttttttaaatgatggttttttttttgtttttttttttttagggtgatttttggttgaattttattttggggagagatttattgtatttcggttttatttagaaaaataattttatggaaatagagtattttttattttttttttgttatttgtttatttttaaaaatttagaattttttttttaaatttttttatttttgtgagggggtgggggttagggaaattgtagtgtattaggattttcggggtattacggataggtggcgagtaggtatgtgagtttaggggagaagggtttgggtggtggagaagagataggggagggttgttaggggtttgagggatttatgggttatgggggagggtatgtggtttgggagttagaatagagatgggttatggttgggattagttgggaggaaggtttataggtttttgaatatttttgttggtttttttatgtttggttaaagtttttttattttagaagtaagattttatttgttttgggttttatagagtttggtttggtgggttatgttaggagttgttataatattttttttatttttattttttagggggtttttggttttttttttttaattttttgttttttgattttttttagtttttttatttttttttattttttttatattttttttaaagaaaataggatatttggttatttaatcgtgagtttagtgtttggaattttttaaggttcggaggtcgttttgtatatttttttgttgatgggttggaaatgagttattttatagaatttattgtatggaaagatttagggtttagaaagaattttttttttttgtttgttgttttggttggtttgggttggaagttataagtaggtgtgatggcggtaatggttttttgggggagggggtagatattgtttattttgtacggtttgggagttatgtttagtatggtgtttgatatataatgggtttttaatatttaaatgtgtgaatatgtttagtggttatttgagggtgttgagaggttgggaggttggtggtggaagagggagtttcgggttttggtgttgtagtaggggggattgtagttgtggacgtttgttttatatttagtgttagggcggttatgataggtagttttgtttgtttgagtagttatggtgtgtagaggaaattattatatattaggagtttggaaattatcgttttattttgttttttcgggtgatttttagtatatgatttcggtatttttgggttttaattttttcgagttttggggaagaaaatgatttattttagatattttatagggttgttgtgagtattaattgtggtattgtgtgaaagtgtttggtaaattgtaaggtaggtataattcgattttaggtttgtataatatatttatatatagtattttatttgttttttatatttattttgtgaggtagggagaataggatttagattttgtagtaaatttatggtgtttggtatttttataggtatgatcgatttattttttaaatggtttgtgtaaatagttagggtatttgtggtttgtttttttttatagatgaggaagttgggtttagagaggtgagatgattaaggtgggattttttttttttgatgaggagtttggggttgggggttggtttgcgtgtatgttagggttttggtattatatttgtttagttttagatggagttaggaggtaaacgaggaggaggtgttagggcggggtcggggggtcggttttagttttagttttggttagttgtttttttgattgttagtatt

SEQ ID NO: 138 - DNA, 12423 bp, Artificial Sequence
  chemically treated genomic DNA (Homo sapiens)
ggtattggtagttaaggaaatagttggttaaggttggagttgaggtcggtttttcgatttcgttttaatatttttttttcgtttattttttggttttatttgaggttaagtaggtgtggtgttagggttttgatatatacgtagattagtttttagttttagattttttattagagaaggggagttttattttggttattttatttttttggatttagtttttttatttgtaaaggaagataagttataaatattttgattatttgtataagttatttggggaataaatcgattatgtttgtggaaatgttagatattatgagtttgttgtagaatttgaattttattttttttattttatagggtagatgtgagaagtaaatgagatattgtatgtgaatgtgttatataaatttaaagtcggattatgtttgttttatagtttattaagtatttttatataatgttatagttgatgtttataatagttttgtgaaatatttggggtagattatttttttttttagaattcgaggaagttgaggtttagaaatgtcgaagttatgtgttgaaggttattcgagaaggtaggatgagacggtggtttttaagtttttgatatatgatagttttttttgtatattatagttgtttaggtaggtagaattgtttgttatgatcgttttggtattaggtgtaaggtagacgtttatagttgtagttttttttgttatagtattagagttcggggtttttttttttattattagttttttaattttttaatatttttaaatgattattaggtatatttatatatttaaatattgaggatttattatgtgttaggtattatgttgggtatagtttttaagtcgtgtagagtggataatgtttatttttttttttaagaggttattgtcgttattatatttgtttgtggtttttagtttagattagttaaaatagtaagtaggagagaggggttttttttaaattttgggtttttttatatagtggattttatggagtgatttatttttagtttattagtaggagaatgtataaaacggttttcggattttagaaggttttaggtattggatttacggttaaatgattaagtattttattttttttaaggaaaatatgagaagggtggggaagagtaaagaggttagaaaagattagagagtaggagattggggaaaggagattagagattttttggggaatggggatgggggaggtattgtggtagtttttggtatgatttattaagttagattttgtagggtttagagtaggtggaattttgtttttggaatgagaaggttttggttaggtatgaagaggttagtaggaatgtttaggaatttatggattttttttttagttggttttagttatagtttatttttgttttgatttttaagttatatgtttttttttatagtttatgaattttttaaatttttgatagtttttttttgttttttttttattatttaggttttttttttttagatttatatgtttgttcgttatttgttcgtggtatttcgagagttttaatgtattgtagtttttttaatttttatttttttataagaataagagggtttaagaaaaaagttttaggtttttgggggtaggtagatgatagggaggaaataaaaagtgttttgtttttatggaattgtttttttgagtagagtcggagtgtagtggatttttttttagaatggggtttagttaggggttattttggaaaaagggggataggaagggagttattatttggaaagggaaagatatagttatttttaagaattggtttgttttttttatgtaggttttttttttttttttgtagggaaaggggggtttggaaggagttttagtgagtgaatgtttttgtgtggaggtagtagatttttgaggaagaggggtttttaggatatttgtttggatttttttaatggtagagttttatcgtgttagtaatttgtgtatttgtcgattttttttgttgagttggggtttttgataggtaggggtattttgatacgtttttagattttttacggagtttgttgtagtgtttggtacggagtagatgattaatatttgggaagattgaatgaatgaatgaacgaattaattaattaataagtttttttgtttagaagttagatgtgtgtttttatttaggtttttttgttttgttttttttgatagaggtgaattgtttataattgggggaaggtatagaagtgattttatagaggagttgtttttttttttgtttttattttatttaggtttagattggaggttttttataggtaaagtttgttttcgaataattttatgtatagtttttgattatgttagtttttttttaagggttttttggtaatttagtttgtttttaagtaatattttgtttattttgtatagttttttttttacgatacgtaagtataaacggatagggaagagattaaggtatacgataatttgggatattttgaatagaggaataattaatgggggggggggttttttattttttttagagtagggtttgtttttttgggaatatggtagtatgttattgtgtgatgtttttttgttgttataacgataggaggatgtgttattaggtggtgtggatttgttgttatggtaattaaaaagattttttttatatgattttttttgattgaggttgttgttttgtttttatgtaggggaggagaattagggagatttataggttattaggttgggggaaaattatgtgatagatttttatggtaattaagggaacgggggatattggttgttatagtgattatgagagatttgtgtagttatatgtttattgttgttatggtgattgttcgggttggagtggattttaaagagggggtaggagaggggaggattttttttttttttataatttattattaaaagtagagaaaaaggaaacggtagagagaggaattttatttttatttttttttttttttttttttttgggagagagaattagagtatgttatttttataaatgagttttttgtgtggggttttatttagatagagtttttgtttagtttggtagtcgtaagggtgaggaaagtagggagaggaggggggtggttgggatatttttaggggtataggggttttgggtatgggttgagaaggtaagtaggttttttagcggttttatttttatttaggagtttggaaatgtgagattaaggaacgttgaggagaaaatgggtttggatttaggagttttggttttttagtaaatgaggaggtagggggataggtttttgttttatttattttatagagaggtttttggtgtttatcggattcggtaatttttagggtaatatgggatgtaggggtttcgttttgttttaaagtttaaagggggatttttttagtagaattttttttttttattttataagtttatttttttgtggttttttttttattacgttttagtgtatgggtgtagggggagagaggtttttagttgaattgaaaattgaagtttatagaaaggtagtcggttttatttagagatagagatatgagatatagagatataagagagacggttcgttggaatttttggaaggggaaataggttagaaatttgatttaaacgtttgtgattttgtgtgtgtgtgtgcgtgtgtgtgtgcgcgcgcgtgcgtatgtttgcgtgtgagtagttgtgtttgtcgttattttggttgaggtaggtagggcggggtgagtgttgggcgggagtaggcgagggtggggggggttgtgtggtgggggtaattttaggaatggttttaattggtattacgggtgatggggagttttttagtagagcggtggagtagagcgggtgggaaggaatgtgtgtgtgatttagaaggaaagtgggtttggggtagaaagtatgttaaggggtgatttggtttttttttaattttatttaattttttagttttagtttttttttttagaattttttttggtgagtttagggtttggaaattaaattggaggagggaattgatgaagagataggaagaatattttttttattattttttttgaggatagaaatggagaattttttttaggtaagagaaataggtagatttggggtattgggatagtgtggtaaggaaggttttagaaatttttgtgtttttatttttttagagggatatatttagatatatagagtgacgtatagttatttatttatatttatttttggaagttattagggtttttgtcgtttaggtttttttttttttttttttttcgatttttggtaggttttttttttttttttttggttttttttttattttttttttttcggtattttaaatgttagtttgtgatttttaaatgagaaaaagttgtgttgggttttgagtttggagaaatttttatataaatttttagatgtgatataatagttagagagggaatgcggaggaattttttttcgagaggggagcgcgtttttttatatttgtaggaatatatattggaaaggttagtatgtttttttttgatttgaggtaggggtgattgtttgttagtatttttgttttttatattaaagtttgtatttttgagttttttgttgtttttttttgtaatatatatatatatatatatatatatatatatatatatatatatatatattttttatttgggtttagattttttttttaggaaatttggttttttaaaaaggagaggttaagaagtagaatgtattaagaaaagtttaattagttttagttagttgggggtggaggggagtgtttttatgttttttcggtttagaggcgtatagggatttttttgaagtttgtggggagttatagatattataaagagaaagagggaggttttggaggtagtttagagtttttttggtagtaaaaatataggtgttttttggtatttgggtaggatggtagtggtgaggggtatagtttaggtagttttttgttaaaaaattgtttttaatttatttttagttaatttaggtttttttagatttagtaatgttgatgttatatatttaattattatttttttgggggaagttgttttttaatttttaaggtgagtgttgtttttttatttttttttttttatgttaggttttaatatttgttttcgtttagattatttagtgaaggagtttgtttttagattttttattagtatttggagatagggtaggcgagaagagatgttagtttagaggtttgtttttagggagaggggagagaagagttttttttattttttttgggatttttgagaaggaggatatagaggttgatgtttttttttattcgtggaaggggtaaatgattaggggtagagaggagagttgttcggaatttattttttttagttatattagttttttatttttatttttgtttgggagaaaggggtttggggttgggggtttaaattttaagattgtgtttatttagtaagaatatagatttttgaggtttgtatttttttttttgtagtttagagagaaaggaagaaggggtagtggatgagaagaggatgtgatgaggggagttttttaaagatttataaggtgtagaggatgggggtgggggggttataagtttatttttgttttgcgtattagaggtagtagagttgtagagagtgagggcggtattaattttttattttttttttttaaagtagagtttttgttaggtttataggggttataagggagatttggggttttttattttgggtttataagaatttttgagttggaaggaaggagtttagagaagttgtttagatttgagatggtagtaatattttttttttatttttttttttttcggtggtaggattcgttagggagtttggggttaggcgtttgttaagtggcgttttgagttagggtttgattgggttggggttttttttattattttagtttgggtagatagggagtagtgttaaatttatttttttggaatgtggggtttgtattttttaaatttatttgcggagtttacgttggggtggtggattcgagttttttttagtgaatatattgatagtattattgtttttttaagattttcgcgggtttgtagttttttatatttggtttgtaggagtattttttatttgtgaaaggggaggagtaatttggattagtttaattttattttttatttgttaaaaaagtttttgatatagtttttttttttataagaaaaatttagtataaaattttttaatttaattttaagtattttgtatcgaatggagatcgggtaggaggtattcgcggtattgggttttagcggaaaggggttttatttttagtttcgggggtagatagtttttttttattatattttgtttttattttgcgtttttgatattagtcgtcgtcggaatttttttgttgtgtttttaattcgcgaggtggggggtgaggtgggttaggatttggttttcgttttttaatatttttttttaggttagtaaaaattttagttttaaggattaggttgggggattagattttagaattcgtcgtaaattttggggcgggggaaggagggaaatttaggagattgcggttttttttttttcgttttcgtagttttttttttatcgtttttatttattttttattaaattcggaaattaaatttagttcgttaatcggcgcgggtagagtatagtttttaggttttcgaagttttttatatttggaggatgacgatttttttttgattatatttggagggcgtttagttgcgagttagcggggtatagttttttttttttggtttggatttttatttttttaatttaggaagattgaggtgtgtgtacgtaggtggggtaagttcgggttatcgacgagatttgttcgcgttttcgtttttattttggtgtttttttttttttttggtagttttttttttattcgtttatttttcgggtttatttcgatttatttggcggtgggtttttttttttttcgattttcggcggtgcggttcgttttttttttgatttcgcgtttggtcgtcgtgtttcgaaggatatgggttatagatcgtgcggagatattagtttcgcgggcggttgttttggtttaagtagaagaaaattatcggggttagcgtcgggtacggtagttttttcgtttcggagttcgcgttgttcgggtttttttttgttgatttcggtttcggtcgttttcggttttcgataggtcgttgagtcgtatgaagtttcggggttgtttcgatttttcggcgttcgttttattttttttttcgtttattttttggttagtcggggtttcgggcgattcggagaggggtaagcggcgttttttagaggaggtgtttttacgtaattcgggggtttcggcgggggtatatttggtgggttttagggcgtaagttgagttttcgggagggttagtttagtttagttttttttgttcgtaggggtatgttgttcgcggggcgtcggggcgtagggaaatttcgttcggcgcgagtttcgttttttttgcgtttttggggtttttcgggttagtcggtcggtttttttttattttgtttcggttttttcgtttcgcgtttaggtttcggttgtcggattcggcgttattttcggcgaagtcgtttcgagagggcgaacgaaaaggggggtagcggcggagggcgggggttcggggaggggcgtttttttttttcgcggcgtagttggagtcggatttaaggggttagtatcgtttcggtttcgcgttaggcggcgggggaggggaggagggatttttttaggggtgggtttggagggggtgggggcggttttttttttcgtttcgtcgcgggtttattgttcgggaggggcggggagatagtggggggtagtttcgggcgggagtggaggcggagatgtcgtcgtcgtagtcgtcgcggtggttgtcgttgtcgtagttgtcgtcggcgttatagttttttttttcggtcgagacgcggagcgagcgagcgaaagcggcggcgaggagtttcgcgtatattatagttggattttttattttaattttaagtttcggtttcgtttttagatagtttcgtagttaatcgtcggacgtcgtcggtttcgagtcgcgcgtttattggtcgttcgtcgtggtagtgcgggcgggagcgtagggagagaattatagttggaattcgatttttattttaaaatttaggatcgttttttttttttttttttgtttttgggttcgttttcgaaggttggagttaattagattgttgtttagatcgaatttatttttttattggttattggggtttttgggatttttttggagggagttcgaagaattagagtattcggcgcggggttttggcgtagggtcgtaggttttaggtattttttgtttacgatttttgatttgggtagtagtcggaggacggagtttagttttgggcgggtttggggaagaaaggagataggcggtacgggggtgagggttgttattagggggttttagagcgaaattttaggtttttatttggttaattttttattttggagttgagtttggttgcgggattggggaagggaaggagcggagttggatgttttgggggtggggttttaggttggaggggtttagttttggagaaacgggcggagttcgagaaaggttagggtaggtatggtttgggcgtggtttttataaattttttgggtttattggttatattttcgagttaattttgagatttcgattttgatttcgtaattttaattcgttggatttgattttatattgacgtttttgggttttatttttttgtttttagggattttttgaagggcgtggattttacgtaggggtttcgtgtttgaatacgtggttttaggtaggtcgcgttggatcgtagagttcggatttttaggaggggttgcggagtagagcgaggatttttaagaaggaatttgtgggggtttcgagtgtgtgggagggggcggaagtatagagttgggttttatcgattcgatttttaaagtttttattatcgttattttttaatttcgtgttttagttttttttaagtttttatgtggtttagggaaggagtgttcgcggaattggaatttcgcgggtttgtcgtttttatttatttattttaattttatcggtagcgggttttcgtgggtttgtgttttttacgcgtgtatacgtacgcgtagatttcggtttttgtttcgtttattttttcgagttttggggtttagtcggttttagtttttttttgtcgtcggcgttattttagaaagttgtgggtattcgggagcggagcgtcgcgggtgtgttgggcgtcggtggaggggggaatagcgaggattagacgtcgggaagtatttttttaatatttgcgagaggtagatacggcggaatttagtgggttagttagtttttttttcggagattttggggcgtttgcgttattgcggagaggcggcgggatgggtcggatgatttttattattattttttattttgttgaggttattatttttgggcgttgtttatttttttaaggttgtattatttacgtagttttcgcgtatttttcgttatcgtagagggttggggtcgttttagttttcgtttcggtcgatggggggaggggatgggggaagtggtagagtggttgttgcgtcgtcgtttttttggttgttttttcgtcgaatttatgtatagagttgtgtaaatgaggtcgggcgggtttatttgtattttatgttaatgagtagattttttaagtgttttttttttttggcgggagtttttgtttttattttgagtatgcggcgtttgagttttgaatttcgtgtcgttttttgggaaaggggggttatttatggttgtttcgcgcgtttgatatttttttttttttcgagaggtcgtagtttgtcgggtcggtttgtttttttcgttaggatagaggtttcggggttggcgcgagaagtagggacgtttaatattttttttttgtagaggggaaaatgaggatagagaggttggtttagtttaatgattaggttttttggtggttagtaggttttatatttttatttattatttcggttatttttgggttttggattgaattttgttttagaatatgttcgaaaggagggtaggtataaacgtattatttagataaattgagatttatatgtatttttttgggtttaggatttaggggagatcggttacgtaagataggatttgatttttgtattcggtatgttggggttgatggttagtcggagatgtttatttttagtttgagtgttagagaggaggtagaggtagaatttatagggaaggtaaagaagatttgaaattatttttatttaattttagttttttaagttttagttttgatattatttttttagagtggttttttttttagtaagtattttaatgttatttaagtgttaaggtgtttaggatatagtatcgagttagatataagtttggaattttatagtatttagtttaggttgggattatatgtttgtgtttgtagtaatgaaatgattatttttttatttaggttttgtgtttttagaggggttatgtttattttgtttattagggttttgtttagtgtcgggtataaagttgttaggtgaatgaatgattttaggtagggaaagggaaataaagggataagaaatttttttttttgggttttagttttttaataaagatattaagtttaattaagagtttttttgggtttgaggaagaattttttttatatatattttgtttagttagtttttttagttttttttagttttgtttttattttttttttatagtttatttggttttttgcggagttaagataatttttttatttgtgatattttttgtttagggatgatataattattattttatttagttattttaatagttttgagagttgggtggatggttttttattttttagataaggaaggggggtgtttagaatgatgaagttatttaagtgatcgtttagacggtatggttttgtttttagtgattttggttcgtaggtgtttcgttggtagaatagggtgtatatttaagagggattagtaaaggggaagggatgttgtaggaatttttataattttgtttttgagtgagatttatgtgggattttgttttttttagaaattcgagtatttttgggagaattaattttttaaggaggtaattttttttttttaatttatttatagaattttattatcgcgtgtatattttattttaggagggagagaggagttgtcgagtagaaagtagattggttgtagggatagaagatattaagggtatttttttttatagttgcgtttggattttttgcgagaagaggaagttttaggggtttttattgtatttttaagattttagagagaaatagaagtgttgaggggtcgtaggtaggttttttattttttttgggtttcgaatatttatttataggaggttgaaggtaattgtttcgtaatttatttatgagggttaatgggacgatagtggtaagaggggttggtatattgtttagattgttttaaagttagggttggggttgttaaaaaggttatttgtgttttattatgttttatttttttttttttttatttttttaggttgggttttatttgtttagttttttgattttttggtaaggttgagtaggttttagttaggaaggggttagttgattttgttggtcggagtattaattttttttagatgggttggtggtttgtattgagggtttggttgtttagatagagttgattttggttttagtgattatgtgtggttatgtgtgatcgtgtgaagggagtaattttatttagtttttcggtttttttttgttttatttttttttattgttgatattttttataagtagtggttttatgaaggtttttttgtttttagtagttttttttggttttttgtgttgtttagttggagggttgaggatgtttggtatagtcgatttttaaaggttttagagggatagtttttttttttgttttttttatttcgttagttttattattttgtatttgttttttttaaagtatgtgttttagtttttattttttaatttaaggaagatgtatgtgttaaggataggatttaggagtattttttaatatttaggggaaaggatgaggttataggaaggttttttttgtagtaagaaggatttagataga

SEQ ID NO: 139 - DNA, 3720 bp, Artificial Sequence
  chemically treated genomic DNA (Homo sapiens)
tgtagttgtttattaaaattttatatatattttggtatataattatattcgttggaatttattttatagatatatttatatttatatagttaaggatgttgattttaataatattggtataagtaaaaagttggaaattgtttatatgtttatggataggggataaatcgattaatttaaggtttttttttataatggagtattatatagttttgaaaaagaatgataagatttttatgttaggatatggtataatttttaagttattttaagtgaaaaaataataataataataatattgtagaataatgtgtatggttggatatatataaatttttttgaaagaatatttaagaaatttaaatgtggttattttaggagttaggaatgaggtaggtggagaggagggatttttattttttaatttagaatatattttgttgtgttagttgattttttttttattgttaataagtattatagttttttttaatttaaattattttttttagtataaatttaaaaaaaaaaaatttaaaatggaaaaatatataggcgtgagtaaaagaaatgaatggtaataatttttgtggtttattgagtgcgtttggatatttatgtgtttttagtttttttttataggaaatgtataggtgagaaattgacgttaagggggattgagtgttaagttagttagtggtagagggtagatttaaatttaatacggtttttttttgttgtttttcggtttttgtttttaggtgggaagcgtatttatcggacggtcggttcggtgaggcgtagcgttttagattggcgtattcgcggttttagcgttttacgtttggggagcgcgcgcgtacgtagcggcgcgagtttggcggcggcggcgataataataacgttatagttcgagttttttttttcggagttttcggtatatattttgtgtttatgtttgggtatttacgttacggcggtagggtcggggttttttaaaatggtagtggttcggggagtcggaagttcggagttagcgtcgtcgtagttatataagtgggggggttgtgggttgggggagttcggtagcgttttggagaggcgaggagtcgtcgttcgaggtcggtgcgggcgagcgagggcgtcgcggtttttcgattttttttttagaggtgagtgttcgaagttaggagttcggcgtttataggtttgtgcgttgcggggaatttttatcgttagttttttcgttattcgcgcgtttttaagtttagcgggcgaggtttcgggcgttttatagtcggcgtcgcgttatgttttattttagcgagtttttcgaattcgacgcgtttttcgttaagtttattgaaggttgttgcgtcgaatttagcgttgaattgtttcggttgtttgttagggacgttttcgcggttatcggttattttggaggtaaggagggcgagtaggggtgtttagacgacgacggcgtagcgcgggggcgtattatatttgagaattaggagggattgggatattggagttatgagaataggggcgatgggaagtttaggagttttggggtgcgtatttttatttttatttatattgggtcgttagcgttttcgtaggaatttgtgcggttatcggagcgtttttttgtttgtgtacgtgtgttttgcgtgtgtatgtttttatgtgttttttgggacgtatgcgggtttttgttgaattagaatgtgtaaaaggtattttgtgtatattcgtgggtattaagagttttgtaggtaggggttgtggatttaggtgtattttttgatgtgtttagagttgatttttgttttttttttagtaggcgattttttgagttgggttttgaatagttgcggcgtaagtggggatttagtcgatttttgttttttggaggggtttgcgtttatattttttttcggttttagttatagcggtagtttttttatttaggtagtgttcgaatattcgtacgattcggaggtattttttaattttatgtcgggcgttttaggtttggtattttttttcggtttagaggtagtagcgtttagattttcgttggatgtttttttttttgcggggttcgatgttttgttgtcgggttcgtcggatttttatttttcggatttgggcgttgttttttttttagaggcgttttgggaggtttcgttttgcgcgggtgttttttcgtagtgtttgtatgagttttagtttttttcgttcgacgttaagttcggttttcggcggtttttcgtttcgttagcgttggacgttgtttttgtttttaagggtttttacgcgttttgggagttgttttttgtgggggttttagggaattgtgggttatagggagattattaggtcgtttcggaggttcgttttttcgtaatagggattaagattgaggatttgttgtttattagttgttttgcggaattgtcggtcgttttagttaatagattttattttagcggggtttatgacgttttttcgttggtttcgggtgatttaggggagggggttgagggtttttttgggtttttgattttttttagtggggagggagggagtagcggcgacggcggagagtttttggttagtacgtagttttagtttttttcgttgggttttcgtagcgtcgtcgcggcggatttttttaaatttttggtggcggatatttttggaagtagtggcgtggttgtattattcgtgtcgtcgtcgtcgtttattttttttttttaggttaaggcgcgacgtaaggggcgtcgcggcggtaaatgtagtacgcgttgtttttgttcgcggtcgtacgttaaggttttcgtttgttcggtggagagttgtgtgcggagttttgcgcgtttcgacgagtttaatcgttatttgcgtatttatacgggttataaatttttttagtgtcgtatttgttttcgtaattttagtcgtagcgattattttattagttacgtgcgtatttatatcggcgagaagttttttgtttgcgacgtgtgcggtcgtcgtttcgcgcgtagcgatgagaagaaacggtatagtaaggtgtattttaagtagaaggcgcgcgtcgaggagcggtttaagggtttcggtttttattcgttgggtttttttttcgtttttttttgagtaagagatgggtttatgggttggggcgtcgtcgttcggcgcgtacgagtttcgggtcgttttttttttcgttttttttttaattttttttcgtacgttcgagggtcggttttcgtttcgtttttagtttttttgaagcgttcgtcgtatacgttttatttagtattagttcgtcggatagttttcgcggtttaggcgttgttatttttgttagtcgcgttttgggggaagttttttgagattatttagtgaataggtattattttgggatttaagatagttttttgtaattgtatacgttttacgtttttttttataatttttagagataggttggggtaggttaaggcggtttcgcgcgggattttgtatagtagtgttttatttagtagtcgattggatgtaacgttttgttttgggttttttttttttttgttgttgttaatttttgtaaagtagacgttatttttaagtagttgataaaattgtttatttttgtaattaaaattattgtgttaaaagtttattgaatttgttatgtaagttttt

SEQ ID NO: 140 - DNA, 3720 bp, Artificial Sequence
  chemically treated genomic DNA (Homo sapiens)
aggagtttatatggtagatttagtaagtttttagtataataattttaattgtaaaaataaatagttttgttaattgtttgagagtagcgtttgttttataaaaattaataataataaaaggaaaaaaaatttaaagtaaaacgttatatttaatcggttgttggataagatattgttgtataaagtttcgcgcgagatcgttttggtttgttttagtttgtttttgggggttatagaggaaggcgtggggcgtgtgtagttataaaagattgttttgaattttagggtagtgtttatttattgggtggttttagaagattttttttaaagcgcggttgataagggtgatagcgtttggatcgcgggaattgttcggcgagttggtgttgaatagggcgtgtgcggcgggcgttttaaggaaattggaagcgggacggaggtcggttttcgggcgtgcgaggaggagttggaagaagagcggggaggggaacggttcggaattcgtgcgcgtcgaacggcggcgttttaatttataaatttattttttgtttagagagaagcgaaggagaggtttagcgagtaaaagtcgaggtttttgagtcgtttttcggcgcgcgttttttgtttgaggtgtattttgttgtgtcgtttttttttatcgttgcgcgcgaagcggcggtcgtatacgtcgtaagtaaaaggtttttcgtcggtgtgggtgcgtacgtggttggtgaggtggtcgttgcggttgaagttgcggaggtagatgcggtattggaagggtttgtggttcgtgtggatgcgtaggtggcgattgagttcgtcggagcgcgtaaagtttcgtatataattttttatcgggtaagcgaaggttttggcgtgcggtcgcgggtagaagtagcgcgtgttgtatttgtcgtcgcggcgttttttgcgtcgcgttttggtttgggggaaaggggtgggcggcggcggcggtacgggtggtgtagttacgttattgtttttagggatgttcgttattagaggtttagggaagttcgtcgcggcggcgttgcgaaggtttagcggggaaagttgaggttgcgtattggttagaaatttttcgtcgtcgtcgttattttttttttttttattaggaggggttaggagtttagggaggtttttagtttttttttttaagttattcggggttagcgggaaagcgttataggtttcgttgggatagagtttgttggttgggacggtcggtagtttcgtagggtagttgatggatagtaagtttttaattttggtttttattacgggaaaacgagttttcggggcggtttggtagtttttttgtgatttatagttttttggggtttttatagaaagtagtttttagggcgcgtagggatttttgaaggtagagatagcgtttagcgttggcgaggcgggaggtcgtcggaggtcgggtttgacgtcgggcggggagagttgaggtttatataggtattgcgagggggtattcgcgtaaggcgaggttttttagaacgtttttgggaaaggggtagcgtttagattcggggagtaaaggttcggcggattcggtagtaaggtatcggatttcgtaggaaaaggggtatttagcggggatttggacgttgttgtttttggatcggggaagggtgttaggtttaagacgttcgatatgaggttgaagagtgttttcgggtcgtgcgggtgttcgggtattgtttgaatgaagaagttatcgttgtagttgaggtcgggagggggtgtgggcgtaggtttttttaggaagtaggagtcggttaagtttttatttgcgtcgtagttgtttaaagtttagtttaagaagtcgtttgttgaggagggagtaggaattagttttgggtatattaaagggtgtatttgagtttatagtttttatttataaaatttttggtgtttacggatatatataaagtgttttttgtatattttgatttagtaggggttcgtatacgttttaaggagtatatagaaatatgtatacgtaaaatatacgtgtataggtaaaagggcgtttcgataatcgtataggtttttgcggaggcgttggcggtttagtgtgggtgggaatgggggtgcgtattttaggatttttaagttttttatcgtttttatttttatagttttaatgttttagttttttttggtttttaggtatggtgcgttttcgcgttgcgtcgtcgtcgtttgagtatttttgttcgttttttttatttttagggtagtcggtggtcgcgggagcgtttttggtaggtagtcggggtaatttagcgttgggttcggcgtaatagtttttagtggatttgacgaggagcgcgtcgggttcggaaaattcgttaaggtggagtatggcgcggcgtcggttgtggggcgttcggggtttcgttcgttgggtttgggggcgcgcgggtggcggggaggttggcggtaggggtttttcgtagcgtatagatttatgggcgtcgggtttttggtttcgggtatttatttttgggaaaggagtcggggagtcgcggcgttttcgttcgttcgtatcggtttcgggcggcggtttttcgtttttttaaagcgttgtcgggtttttttagtttatagtttttttatttatatagttgcggcggcgttggtttcgggttttcgatttttcgggttattgttattttgggaggtttcggttttgtcgtcgtgacgtaaatgtttaaatatggatataggatgtgtgtcggggatttcgaaaaggaaagttcgagttgtgacgttgttgttgtcgtcgtcgtcgttaggttcgcgtcgttgcgtgcgcgcgcgttttttaggcgtggagcgttggggtcgcggatgcgttagtttggggcgttgcgttttatcgggtcgatcgttcggtagatgcgttttttatttggaggtagaggtcgaggggtagtaggggaggatcgtgttgggtttgaatttgttttttgttattaattagtttgatatttagttttttttaacgttagttttttatttgtgtattttttgtggagagaaattgagagtatataaatgtttaggcgtatttagtaaattatagagattattgttatttattttttttgtttacgtttgtgtgtttttttattttaagttttttttttttaaatttgtgttaggaaaaataatttaaattaaaaaggattgtaatatttgttaatagtaggaggaaagttaattagtataatagggtatattttaaattgaaaagtaaaagttttttttttttatttattttatttttagtttttgaggtagttatatttaagttttttgggtatttttttagaagaatttatgtatatttaattatatatattgttttgtaatattattattattattatttttttatttgaaataatttagagattgtgttatgttttgatataaagattttgttatttttttttaaggttgtatagtattttattgtaagggaggattttgagttagtcgatttattttttatttatgagtatgtaggtagtttttaattttttatttatattaatgttgttggagttaatatttttgattatataaatgtgaatgtgtttgtgagataaattttaacgagtgtaattgtgtgttaaagtatatgtaaaattttgatagataattgta

SEQ ID NO: 141 - DNA, 8759 bp, Artificial Sequence
  chemically treated genomic DNA (Homo sapiens)
tagtttggaagagggtagttaggggagaagttagggttggagttatgagaaaggataagatgagatgatggttttaatattgaggatagaaagaatattgagatgagaaagtagtttattataagtatttatgtaaaggaaatagtagatgtttataaattagtagaggtaataattttgaaagtttatttataagtttttttttttatttttaatttagtttaaatgtaattatttaaattgttttttatttttttttttggattatgaatgagttttttaaatgtagggtttatagtgttttatttattagtgaattttaagtgtttagtatagagtttggtaaatagtaaatgtttaataaatattcgtttagtgtatgaattggagtgattttttattttgtttataagttgaaaaaaggtttattatatatttaaatatgttgaaattatagggtatttggtaattttttaaaattaaaatttttagtttggaaatagaattttaattttgtgaaaataaaatttatttatttatttaaaaaatatttattaaataatgattatgttttatattaggttgagttttaaggatttaatgatgaataaaaattaatatgatttttgtttttaggaaatatatagtttagtgaggaaaatagattgtgagaagttttttaataaatattgggtgttattaaaatatattaaaaggtgagtgggtgagggatttgagttagtttaggtggtttaggaagtttttttggatgtgttgatatgtataggtattaattagataaatagagagaaggatgaattaatattgtaggtagagggaatagaatatgtaaaggtaggaaggattatggagtcgttggaggatttgaataaaggttagtgtaagtggattttagaaaataggaggaaaggtgtatgagatgagattagagaggtagattatgtggggtatggttaatgttttggatttttttattaagagtaatggggagatagtgataggatttaaacggggaaataatatgattagattaaattttttaaaaaattttttatgtaaatatatattgagagttaattattgataaagatttaaaggtaataaagtggagagagaatagtatttttaaaaaatggtgttaaaataataggatatttatattaaaagttgggtatttgtttataaaatttaatttaaaatggattatagatttaaatgtaaaattgaaagttatataatttttggaagaaaatatagatgggaatttgtgtgattttgagtttgaaaatgatttattatatttgatattataattcgtaagttaatataatttataagtgaataaagtgatgaattggattttattagaatttaaaatgtttgtgttttaaaagatattggtatgataatgaagataaattatagataagatattgttgaattatatttttgataaaggaattgtgtttagaatatataattttaaaatttttataataaattataagtagtttaattaaaaaaaaaaaaagagaaaaaatttatagtttttattaaagaaagtatataattgtaaaataagtatatgaaaaatgttttgtatttttatttatgggagaaataaaaattaaatgggaaagatatttttaattagaatattaaaattaaaaagattgattatattaagtattggtgaagtggaaatgtaaaatgatataattatttaggaagatgatttggaagttttttataaaagtaggtgtatatttattttgtgatttatttattttatggttaagtatttatttgagagaaatgaaagaatatatttatataaagatgtttatataaatatttatagtagttttatttgtagtagttttaaattgaaaagaatttaaatgtttattaaaagtgaatggataaataaagcgtggtatagtaatgtaatagaatattatttagtaataaagaagaatgagttagtgatatatataatagtttaaatgtatattaaaggtattgtgtttagtgaaagatgtaagtaaaaaaaaaaaagagtatatgttgtatagttttattgatataaaattttggaaagtgaaaaatagtttatattgatagaaagtagattattggttgtttgaggaggaggagtataggagaggtggagggaaaatgtataaagtggtataataaaaatttttggaattatagatatatttattattttgattgagtgatgattttatgagtgtacgcgtgtgttaaaaatgattaatttatgtaattttaaatatgtgtagtttattgtatatattaattatattttagtacggttattaaaaagaaattttttggttgtataatgtagaattgattttaggaaagagtggagggaggatgattatttatagtgttttaggtggaagagaacggtgttttttggaagtgaattaggttggtaataatagagatgaaataaatgggtagatgtgtgagatatttaggaaataaaattcgatggttattattttttaaaggttagtttattttggttttttagagtaaagagttagggaagattttattaataaattttttttgaagttgtagaggaagtttatagtagaaatttatttttaatttgattaatttgagagaatatttttggttttatttgattattaaaaaattgtaaagaataggaggagaaagaagaagaaagttggtataaatagtgaatttatataatattaattaataattgttttttgtttttaaaagtaatgggaagaaaatgagatttgagttggaagattagagtttaaaatttaaataaagtatatggttttaatatgtttatagtagttaattttttttgataatgatataattgttgatagtattatttttaaaaataaaaataatatagtaattttttagatttgtagaatgtttttttgtttataagtttgttttatatatattatgttttttaaatgatatattagttttttgagggtaatttatattggtaatagtttttagatgtggaaattgtgaagataatgttggtgatgtggaagtaatataaattttggagttttttagatttaggtttgaatgttagattgttttttatttagagtaattttagagtattattttttattttaatttttttttaggtttttttgtgtttatgtgttttttttatttttgtttattgtttatttagtgatttttgtatttttttttattgttagtgtgtagatatatagtttttttggttttgagatttatgttaattttattttattattttgttagtttatttaatttttattgagtaatgttagttgaaagttgtggtgggattaaatgttgtaatgagtatttaaatgaggttgaagtatttacgtattttatttatatatggtgaggtatatttaaggaaggttgtagttattaaaattttaggaaataattttttatttttttaggtgaaagggtttttaggtttttgtgttttggaaggtttatttatagttattttttaaatgataatgcgattgatgagtttagagtttagtttaaatagtaatggattggaagattagtttaggttttattaatgtggaatatagaataaattatgtttttgttttagtttgtttatttgtgaaatagagtttattatatttagttttttttgtttttaggtttgagttattttttttggttaaggtaagtaaatgtttatgatgtttggttgtgtataagataaagttataataaagttataatttattttttttttgtagaagattgtaaaaagtaaaagagatttaggtaaaaatttcggaatgatttttggaatagagagtttttttagaattagaagttaaaggaatttaaaatatagggaggtttagggtttttattgatataaaggaaagatgttttttttataggtttacgtttatattttttttttttttttatttttatttgtatttttatttttatatagggtttatgggattttttttataaaagagtagttgtagtaatttatattattttttacgtttggttgtttattaagaggcgaaaagtagttttatataggttttatttttggatagttttagttgtaaagtttaaaatatgcgaaggtaatttggaaaagtaagcggttgtatataaagtaaacgtttatagagttttggataaaattgagcgtttatgtgtatatggtaagtgtttttagtgtttgtgtgtttatttgtttgtttgggtgattttgtttttgagagtttggatgagaaatgtatggttaaaggtaattttagataggaagaaaggtagagaagagggtagaaatgatttttgatttttggggttgagggtttttagagtaaatggtataatgttacgaggttcgatttatttttatgacggaatttaaggttttagtaagtatttgttggtttggttatggtttgttttttagtttgtaggagatttttttatttttttatttgcgcgtttttattagttttgaaaagaatttttggtagttaggagtaggtatttttatcgttttttttttttttttttcgtttttattttgttggttttttagattgggttttggaattaaatttggtgagtgttggtttttaggaaatttggagttttggcgtttaaattttggtttaggaaagtaggagttatttaggaagtaggggttttttagggttagagttagttttttttgttttcgtttacgttgcgttagtatttgtttttttaaagttattaggtaggcgttagcgcgcggtgaggggaggggagaaaaggaaaggggaggggagggaaaaggaggtgggaaggtaaggaggtcggttcggtgggggcgggattcgattcgtaaattgttgtatttgttttttattttttagcgtttttttcgagatttcggggagttagtttgttgggagagcgggacggttcggagtaagtttagaggtagaggaggcgatagagggaaaaagggtcgagttagtcgttttagtgttgtataggagtcgaagggacgtattacgttagttttagttcggttttagcgatagttaacgttttttgtagcgcggcggtttcgaagtcgtcgttcggagttgttttttttttttcggtgaagtttttaaaagttgttaaagattcggaggaagtaaggaaagtgtttggtaggattgacggttgtttttgttttttttttttttatttcgtttttttttattttgttttttttttttttttcgttttttttttcgtagttgttttagtcggttatttttagttaattttttttattatttttttttttattcgttttttcgttttcgtcggtttagcgttgttagttcgagtttgtagagaggtaattttttttggttgcgagcgggcgagttagttgtatattgtaaagaaggtttttaggagttaggcgattggggagcggttttagtattgtagttacgattcgtttggttaggttgtacgcggagagaattttttgtttttttttattttttttttatttttttttgttttttttatttcgagtgcggagttagagattaaaagatgaaaaggtagttaggtttttagtagttaaaaaataaaataaataaaaataaaaaagtcgaaataaaagaaaaagataataatttagtttttatttgtatttattttagtggatattgaatttggaaggtggaggattttgttttttttttttaagatttgggtattttttgaatttattttttaagtattaagagatagattgtgagtttagtagggtagattttgtttatcgtgtgtttttttttgtacgagattttgaggttgttagagcgttttttgcgtggttgttttcgtaagtttttttttttggagtttttcgtaggtgggtagttagttgtagcgattatcgtattattatagtttgttgaatttttttgagtaagagaaggggaggcggggtaagggaagtaggtggaagatttagttaagtttaaggatggaagtgtagttagggttgggaagggtttattttcggtcgtcgtttaagatttatcgaggagttttttagaatttgttttagagcgtgcgcgaagtgatttagaattcgggttttaggtatttagaggtcgcgagcgtagtatttttcggcgttagtttgttgttgttgtagtagtagtagtagtagtagtagtagtagtagtagtagtagtagtagtagtagtagtagtagtagtaagagattagttttaggtagtagtagtagtagtagggtgaggatggttttttttaagtttatcgtagaggttttataggttatttggttttggatgaggaatagtaatttttatagtcgtagtcggttttggagtgttatttcgagagaggttgcgttttagagtttggagtcgtcgtggtcgttagtaaggggttgtcgtagtagttgttagtattttcggacgaggatgatttagttgttttatttacgttgtttttgttgggttttatttttttcggtttaagtagttgtttcgttgattttaaagatattttgagcgaggttagtattatgtaatttttttagtaatagtagtaggaagtagtattcgaaggtagtagtagcgggagagcgagggaggtttcgggggtttttattttttttaaggataattatttagggggtatttcgattatttttgataacgttaaggagttgtgtaaggtagtgtcggtgtttatgggtttgggtgtggaggcgttggagtatttgagtttaggggaatagtttcggggggattgtatgtacgttttatttttgggagttttattcgttgtgcgttttattttttgtgttttattggtcgaatgtaaaggttttttgttagacgatagcgtaggtaagagtattgaagatattgttgagtattttttttttaagggaggttatattaaagggttagaaggcgagagtttaggttgttttggtagcgttgtagtagggagtttcgggatatttgaattgtcgtttattttgtttttttataagttcggagtattggacgaggtagttgcgtattagagtcgcgattattataattttttattggttttggtcggatcgtcgtttttttcgtcgtttttttatttttacgttcgtattaagttggagaattcgttggattacggtagcgtttgggcggttgcggcggcgtagtgtcgttatggggatttggcgagtttgtatggcgcgggtgtagcgggattcggttttgggttatttttagtcgtcgtttttttattttggtatattttttttatagtcgaagaaggttagttgtatggatcgtgtggtggtggtgggggtggtggcggcggcggcggcggcggcggcggcggcggcggcggcggcggcggcggcgaggcgggagttgtagttttttacggttatattcggtttttttaggggttggcgggttaggaaagcgattttatcgtatttgatgtgtggtattttggcggtatggtgagtagagtgttttattttagttttatttgtgttaaaagcgaaatgggtttttggatggatagttatttcggattttacggggatatgcggtaagtttttttttttagaaatgtcgtttttcggtttagggtagagttattttgtgttttggggtatttagcggtttttatttgcgcgaatatttagattgtttttgggagagtttagtagggtaaatttagagttttttcgtggattttcggtttgttagaggtttaatttgagtttttttaatttttgttgcgtgttttgggtgttgatttttgtttttttagattttttaatttttttaatcgttttaaatttttattattttttggtattcgaggttttaaatagaaattttattgtacgggttatttttagagataaagtttttaagttttttattttttttttttttttgtttttaaagtttgagaattttaataggaatttgggtaattttttttttttaggtttgttaggattttatttttagtttgcgtagattagagttaaaaagatcggtttaatagttttttagcgggtattttttagagaggtaaagtgaaattttcggttagggaaagaaagtggtttttgggtgttgaggtttgttgtgtgaaagggtgaattttttttttttgaagtaattggggatttgttttagggttggaggttagtagagataatttaaatcgttatgtttagagtaggtagaggggtaatttttttggtaaagattttataggatttgtatttatagttttttaacgttggttgattatgttgaaagtagttgtttgggtcggtttttttttgtaaagtgtttattttttttgtggattataatagatttatagttttttattttaggtttgtattagatttataaagaggagaatatttttttaatgtataatttaattaggtttgattttgatttataaaattgttggaaaatatttttttgtaaagtattttttgttattttagtgtgttttaaaatttttattggggagggtggagtgaggttttttattatatttttttatttttaggatatgtttgtattttagaatatgtgtagttagtt

SEQ ID NO: 142 - DNA, 8759 bp, Artificial Sequence
  chemically treated genomic DNA (Homo sapiens)
agttaattgtatatattttaaaatgtaaatatgttttaaaaataaaggaatataataaaaaattttattttattttttttagtggagattttggagtatattgaaatagtaggaaatgttttataaaaaaatgttttttaatagttttgtaagttagagttaagtttaattaaattgtatattaaaagaatatttttttttttatagatttgatgtaaatttgaagtagggggttgtggatttgttataatttatagagaaaataaatattttataagagaaaatcgatttaagtaattatttttaatatagttaattaacgttgagaaattgtgagtgtaaattttgtgaagtttttattaagaaagttgtttttttgtttattttaaatatgacggtttggattatttttattgatttttagttttggagtaagtttttagttgttttaggagaaagaagtttatttttttatatagtagattttagtatttagagattattttttttttttaatcgagaattttattttatttttttggaggatattcgttgagaagttattgggtcggtttttttgattttaatttgcgtaggttgaaagtgaaattttaatagatttgaagaggagaaattgtttaaatttttgttgaggtttttagattttgaggataggaggaaaggaagagtggagggtttgggagttttatttttgaaggtggttcgtgtaataggatttttgtttgggatttcgagtattaggaggtagtgagaatttggggcggttgggggagttgaagaatttgggagggtaggaattagtatttagggtacgtagtagaaattaggagagtttaggttaaatttttggtaggtcgggagtttacgggagagttttaggtttattttgttgagtttttttaggggtaatttgagtgttcgcgtaggtaggagtcgttagatattttagaatatagagtgattttgttttgggtcgaaaggcgatatttttggaaggaaaaatttatcgtatgttttcgtaaggttcggagtagttatttatttaggggtttatttcgtttttgatataagtgggattgggatagggtattttgtttattatgtcgttagggtattatatattaggtgcggtgaagtcgtttttttggttcgttagtttttgagggggtcgagtgtagtcgtagggggttatagttttcgtttcgtcgtcgtcgtcgtcgtcgtcgtcgtcgtcgtcgtcgtcgtcgtcgtcgttattatttttattattattatacggtttatataattggtttttttcggttgtgaagagagtgtgttaggatgaggaagcggcggttgagggtgatttagaatcgggtttcgttgtattcgcgttatgtaggttcgttaggtttttatagcggtattgcgtcgtcgtagtcgtttaggcgttgtcgtagtttagcgggttttttagtttgatgcgagcgtggggatggggaggcggcggagggggcggcggttcggttagagttagtggaaagttgtagtagtcgcgattttggtacgtagttgtttcgtttagtgtttcggatttgtagagagatagggtagacggtagtttaagtgtttcggagttttttgttgtagcgttgttagagtagtttaggttttcgttttttagttttttggtgtaattttttttgaaaggggaatatttagtagtatttttagtgtttttgtttgcgttgtcgtttagtagagaatttttgtattcggttaatggggtataaggagtgggacgtatagcgggtggaatttttaaaagtggggcgtatatgtaattttttcgaagttgtttttttggatttagatgttttaacgtttttatatttaggtttatggatatcgatattgttttatataattttttggcgttgttagaaatggtcgaagtgttttttaagtaattgtttttggaggaagtgggagttttcgaggtttttttcgttttttcgttgttgttgttttcggatattgttttttgttgttgttgttgaaggagttgtatggtgttggtttcgtttaggatgtttttaaggttagcggagtagttgtttaagtcggggaaagtggggtttagtagggataacgtggatggggtagttgagttattttcgttcggaggtgttggtagttgttgcggtagttttttgttggcggttacggcggttttaggttttgggacgtaatttttttcggggtggtattttagggtcgattgcggttgtgaaggttgttgttttttatttaggattaggtagtttgtggggtttttacgatgggtttggggagaattatttttattttgttgttgttgttgttgtttggggttagttttttgttgttgttgttgttgttgttgttgttgttgttgttgttgttgttgttgttgttgttgttgttgttgtagtagtagtaaattggcgtcgggaggtgttgcgttcgcggtttttgggtgtttggggttcgggttttggattatttcgcgtacgttttggaatagattttggaaagtttttcggtaggttttggacggcggtcgagggtagattttttttagttttaattgtatttttatttttgagtttggttgaattttttatttattttttttatttcgttttttttttttttgtttagaagagtttaataggttgtgatgatgcggtagtcgttgtagttagttgtttatttgcgggaagttttagagaaggaaatttgcgggagtaattacgtaaaaagcgttttgatagttttaaagtttcgtgtagaagaagatatacggtggataagatttgttttgttaggtttatagtttgttttttaatatttgaagggtagatttaaaagatgtttagattttaaaagaaaaaaataaaattttttattttttaaatttagtgtttattgaagtaggtgtaaataagaattgagttattattttttttttttatttcggtttttttgtttttgtttgttttgttttttggttattgaagatttgattgtttttttattttttgatttttggtttcgtattcggggtggggaaggtaggaggaggtggagagagagtgggggaaaatagagggtttttttcgcgtgtagtttaattaggcgggtcgtggttgtagtgttgaagtcgttttttagtcgtttggtttttaagagttttttttgtaatgtgtagttagttcgttcgttcgtagttaaagggagttatttttttgtaaattcgggttggtagcgttgggtcgacgggggcgggggggcgggtggggagaagggtggtgaggggggttggttgagagtagtcgattgaggtagttgcgggagagaagacgggggagggggggaaggtagggtggggggaggcggggtggagaggaggaggataaaggtagtcgttagttttattaggtattttttttgtttttttcgagtttttagtagtttttaaaaattttatcgaagaggaaagggtagtttcgggcggcggtttcgaagtcgtcgcgttgtaagaggcgttggttgtcgttggagtcgggttggggttggcgtggtgcgttttttcggtttttgtatagtattggagcggttagttcggttttttttttttttgtcgttttttttgtttttgggtttgtttcggatcgtttcgtttttttagtaagttggtttttcgggatttcggagggggcgttgggaggtggagagtaaatgtaatagtttgcgagtcgggtttcgtttttatcgggtcggtttttttgtttttttattttttttttttttttttttttttttttttttttttttttttttatcgcgcgttaacgtttgtttagtggttttggagaaataagtgttggcgtagcgtgggcgagggtaggagaggttagttttagttttggaggatttttgttttttgaatagtttttgtttttttaaattaaggtttaggcgttagggttttagattttttggaggttagtatttattaaatttggttttaaagtttaatttaaaaaattaatagggtggaggcgagggagggaggaaaaggacgataggaatatttgtttttggttgttaggggttttttttaggattgataagagcgcgtagatgggagagtgggagagttttttataaattgaggagtaagttatgattaagttagtagatatttgttgaaattttagatttcgttatagggatagatcgggtttcgtggtattgtgttatttgttttaggaatttttagttttaagaattagaggttatttttatttttttttttgtttttttttttgtttggaattgtttttaattatgtattttttatttagatttttaaaggtaaaattatttagataagtaggtaaatatataaatattaaaaatatttgttatgtatatataggcgtttaattttgtttagagttttgtaaacgtttgttttgtatgtagtcgtttgtttttttaagttgttttcgtatattttaaattttataattggaattatttaaggatagaatttatatagggttgtttttcgttttttgatggatagttaggcgtagaggatgatgtgggttattgtaattgtttttttgtggaggaggttttataagttttgtgtaaaggtggagatgtaagtgggaatggaaagagagagaaaatgtaaacgtaaatttataaggaaaatattttttttttatgttagtagagattttgggtttttttatgttttaaatttttttgatttttgattttggggaggttttttgttttaaaagttatttcgagatttttgtttgggttttttttgttttttgtagttttttatagagaaaagatgggttgtagttttgttgtagttttattttgtgtatagttaaatattataggtatttatttattttgattaaagaaggtaatttaaatttaaaggtaaggaagattggatatgataggttttattttatagatgaataggttgaaataaggatataatttgttttatgttttatattagtaaaatttaaattagttttttagtttattgttatttgagttagattttagatttattaatcgtattgttatttgggaaatggttataaatgaattttttagaatataaaggtttgaagatttttttatttgaggaggtgaaaaattattttttgagattttaatggttatagttttttttgaatatattttattatatgtaagtagaatgcgtagatattttaattttatttgaatatttattgtaatatttaattttattataatttttaattagtattgtttaataggaattgagtgggttggtaggatggtagaatggaattaatataggttttagagttaggagaattatgtgtttatatattaatagtgaaggaaggtgtaaaaattattgaatgaataatggataggagtgaagaggatatatagatataaagaggtttgaaaaaaaattaaggtgagaaataatgttttgaagttattttgaataaaaagtagtttgatatttaaatttgggtttgaaagattttaaagtttatgttgtttttatattattaatattgtttttatagtttttatatttgaaaattgttgttaatataagttatttttagaaggttagtgtgttatttaaaagatataatgtgtatagaataaatttgtaaataggaaagtattttataaatttgaaggattattatgttatttttatttttaaagatggtgttgttaataattatattattattaggaaaggttaattattataagtatattagggttatatattttatttggattttgaattttgattttttagtttaaattttattttttttttattgtttttaagaataagagataattattgattaatattatataagtttattgtttgtattagttttttttttttttttttttttgttttttgtagttttttagtaattaaatggaattagaggtgtttttttagattagttaggttgagagtaagtttttgttataagttttttttgtaattttaagagggatttattaataaagttttttttagttttttgttttggaaagttaggatgagttgatttttggaaaatggtgattatcgggttttattttttaagtattttatatatttgtttatttattttatttttgttgttgttaatttagtttatttttagaaggtatcgtttttttttatttggagtattgtaaatggttattttttttttatttttttttagaattagttttgtattgtgtagttagagggtttttttttaatagtcgtattgaggtataattgatatatataataaattgtatatatttaaagttgtataaattgattatttttgatatacgcgtgtatttatgaaattattatttaattaagatagtgaatatatttatgattttaaaagtttttattgtgttattttgtatattttttttttattttttttatattttttttttttaggtaattaatgatttgttttttgttagtatagattgttttttattttttagagttttatgttaatggaattatatagtatgtatttttttttttttttatttgtattttttattgagtataatgtttttgatgtatatttaagttgttatgtatattattagtttatttttttttattgttaagtagtattttattgtattgttgtattacgttttgtttatttatttatttttgatggatatttgggttttttttagtttggggttattataaataaaattgttataaatatttgtataaatatttttgtatggatgtatttttttattttttttaggtaaatatttagttatggaatgggtgagttatagggtaggtatatatttatttttgtaagaaatttttaaattatttttttaagtgattgtattattttatatttttattttattaatatttggtatggttagtttttttaattttagtattttaattagaggtgttttttttatttaatttttattttttttatgaataaagatgtagagtattttttatgtgtttattttataattgtatattttttttgatgaagattgtaaattttttttttttttttttttttaattgggttatttgtaatttattatgggggttttagagttatgtattttgagtataatttttttattagaaatatgatttaataatattttatttgtagtttgtttttattattatattagtgttttttgaagtataaatattttaaattttgatgaagtttagtttattattttgtttatttatgaattatgttaatttacggattatggtgttagatataataaattatttttaaatttaagattatatagatttttatttgtgtttttttttagaagttgtatagtttttagttttatatttaggtttgtgatttattttgaattaagttttgtagatagatatttaatttttaatatagatgttttattgttttggtattattttttgaaaatattattttttttttattttgttgtttttgaatttttgttaataattaatttttaatatatatttgtatagagggttttttagaaagtttaatttggttatattattttttcgtttaagttttgttattgtttttttattgtttttaatagaaaagtttaaaatattaattatattttatatgatttgtttttttgattttattttatatatttttttttttgttttttgagatttatttatattggtttttatttaggttttttaacgattttataattttttttgtttttgtatattttgttttttttatttgtaatgttggtttatttttttttttatttatttagttaatgtttatgtatattagtatatttaggaagattttttgaattatttaggttagtttaagttttttatttatttattttttaatatattttaatagtatttagtatttgttggaggattttttataatttgttttttttattgaattgtatgttttttaagagtaggaattatgttggtttttgtttattattgaatttttaggatttagtttggtgtgggatatggttattgtttaataaatattttttgaataaatgaatggattttatttttatagaattaaaattttgtttttaaattgggagttttggttttggggggttgttaaatgttttgtgattttagtatatttaggtatgtaataaatttttttttaatttatgagtaaagtagagaattattttaatttatgtattgaacgaatatttgttaagtatttattatttgttaggttttgtgttaggtatttggaatttattgatgaataggatattgtggattttgtatttaaggagtttatttatgatttaggaaggagagtgaagaataatttaaataattatatttgaattggattggagatgaaaagaggggtttatgaataaatttttagagttgttgtttttgttgatttgtggatatttgttattttttttgtatagatgtttataatggattatttttttattttaatattttttttgtttttaatgttgaagttattattttattttatttttttttatagttttagttttaattttttttttggttgtttttttttaggtta

SEQ ID NO: 143 - DNA, 8404 bp, Artificial Sequence
  chemically treated genomic DNA (Homo sapiens)
aggaagttaaaaattttgaaaaaaggttagaggaattgttatttaaaataagtagtttagagaagaatataaatgatttgatggagttgaaaaatatagtataagaatttcgtgaagtatatataagtattaatagttaaagtagaagaaaggatattagagattgaagattatttttatgaaataaagtgtgaagataagattagaggaaaaagaatgaaaagaaacgaataaagtttttaagaaataggggattatgtgaaaagattaaatttatgtttgattgtttttgtatttgaaagtgatagggagaattgaattaagttggaaaatattttttaggatattatttaggagaatttttttaatttagtacgataggttaatattttaatttaggaaatatagagaatattataaagatattttttaagaagagtaattttaagatatataatcgttagatttattaaggttgaaatgaagttaaaaatgttaaaagtagttagagagaaagtcgggttatttataaagggaagtttattagattaatagtggatttttttgtaaaaattttataggttataaaagatgggggttaatatttaatatttttaaagaaaggaatttttaatttagaattttgtatttagttaaattaagttttataagtgaatgataaataaaattttttatagataagtaaatgttgagagattttgttattattaggtttgtattataagagtttttgaaggaagtattaaatatggaaaggaaaaattggttttagttattgtaaaaatatattaaattgtaaagattattgatattatgaagaaattaatgggtattaattaatgggtaaattaattggttagtattataatgataggattagatttatatataataatattaattttaaaagtaaacgggttaagtgttataattaaaagatatagattggtaagttggataaagagttaagatttattagtgtgttgtatttagtagatttattttatatgtaaagatacgtgttttaaataagggaatggaggaagatttattatagtaatggaaagtaaaaaaaaaaaaaagtaggggatgtaattttagtttttgataaaatagattttaaattaacgtagattagaaaaagataagaagggtattatatgatggtatagggattaatgtaatatgaagagttatttattttaagtatgtatgtatttaatataggagttattagatttataaagcgagtttttggagaggaagaaagagatttagatttttacgtaataatagtgggagattttaatatttcgttgttaatatttgatagattaatgagatagagtaattaataaggataattaggattttaagttagttttgtattatttagattaaatagatatatttaatatatatatatatatatatatatatatatatattttttgagatggggttttgtttttgtcgtataggttgaagtgtagtggtatgattttagtttattgtaatttttgttttttgggtttaagtgatttttttgttttagtttttagagtagttgggattataggtatttgttattatatttagttaatttcgtatttttggtagagatgtggttttattatgtttgttagtttggttttaaatttttgattttaggtgatttattcgttttggttttttaaattgttgggattataggcgtgagttatcgtatttggtttagattttgtcgaaattttaatatttttttggtaatgtaatagaaaattaaagattttgatggtgaatttaattgtttttgagttgtgtggatgaaaatatattttattatttttttttttaatttttaagtttttaggtatatgtgtaggatgtgtaggtttgttatataggtaaatgtgtgttatggtggtgtgttgtatagattaatttattattatggtattaagtttagtatttattagtttttttgatgttttttttttttttattttttttcgttataggttttagtgtgtgttgtttttttttttgggtttattttatggtatgtatgtgtgtatgtgtgtgtgtgtgtgtgtgtgtgtgtgtgtgtgtgtatttatttatgtgtatatattatgatatatatattatattttttttaaattattattttaggtttagggatatatgtgtaagtttgttatataggtaaattgtgtgtttttggggtttggtgtgtatagatttttttattatttaggtaataagtgtagtatttgataggtagttttttgattttttgtttttttattttatatttttaagtaattttttagtgtgtgttgtttttttttttatgtttatgtgtttttattgtttagtttttatttataagtgagaatatgtagtgtttggttttttgtttttgcgttagtttgttgaggataaaggtttttggttttatttatgtttttgtaaaggatatgattttatttttttttatggttgtaggaaaatatattttatatattagtgaatatagttaaattaatttatggttaagatatatatttttttgtaaattgagaaatttttttattataattgtaatatggtaataaataaatttagattatataaatgtaatttagatgttgataaattggttttaaataaagtaagtgatatttacgtatgaagagagtttattttagtttttagaatttttttttatttttttgttatttttatttttagtaagtaagtatttattgtgtgtgtaatattgtgttaggtattaaggtaatgatgatatttaagatttggtttttattttgaagataagtataggagaaatattattagttatgatgttttttgttgtaaataagtgaaaattttagtttagtttaggttagttttagggttggttaaattagaggtttatttataatattgaggatttagatttttttgaaattttttttgtattaatattagtatttttattttttttgtagggtggtttgttttacgttataatggttgtagtaattagaagtgttatatttttagtaatatttaatattattattattatttaataatatttagaattgtgttatttttgttttaatttattaggtttttagtagattattttttattttttaaatgttaaaattgtattttgagtttttgtttaaattaatttggggtgaggtgaatggaagtagtattttaattgtatttattttttgtagttggatttgggtttgggttattttttgatatttgtttataagaaagatttttgaagttaggtaggaatggttgttgagtaggttagtgtttgttaaatttttatatatttttatatatgttataatatgtagataaaaagataattttttatataatttgttgggataaatttaggaggtttatagtatgatttgtttgaaggttttttttgttttagattttgtttagttgttttaggatgaggggatttatattatagtataattgtattttatttatagtataaattattttttttttttttagttgacgagtttagatgggtaataatagtgtttgttaaagagaaaaaaaaatgtatttaaattagataatttattggtataaatatcgagatatagaagtgataatagttttaagttaatgtttgatggtggtagttttagtaagtttttttttgatgtttttgtgtttttgtatatgttttttttttgttattgttttttttattaaatataatataatggataagtggaattaaatagaattgagtttaaattttttgttatttatcggttttggtattggataaattaatttttttgagtttgtttttttatttgtaacgtagattagttaatattatttattggaaagcgttgttttttagttaatgtatgtaaggtttaaaatttagatgacgggttgataggtgtagtaaatttttatggtatacgtatgtttatgtaataaatttatacgttttgtatttgtatttcggaatttaaagtaaaaaaaaaaaaaaaaaaaaaaagaaagaaagaaaaagaaaaaaaaggttgtttttggggattaaataagataattatgtaaggtggttagtatagtttttggtatatagtaaatgttaggtttgtttgatagatttttatttagtagttattgtttttttgaaaattttttttagacgtttttacggtgtttttcgtttttatattattataattttttattatattattattcgtttattttttatagttttttttttttttttttttaattagtgattttaaaaggttagtaagtgtttaatattttttattttttaagtgattggtaaagtttcgtatttattagcgttttaagtttgtttttgttttggtcgattttgtaaaacggattgggcgggatgagaggtggggggcgtcgttaaggagggagagtggcgttttcgtcgagggtgtattagttagatattttttgcggggttcgagagttttttttattagatttcgggatagggatgaggtttatagttatttattagattttttgtatagtttcgttaagtgtatttcggtttggagggggtggttttgggtagaagtacgttcgggtcgcgtcggatgttttttggaaggcgtttggatttacgttaggttttttagtttaattttttatgatttagcgttttagttcgcgtatcgattagcgttttagttttttatagacgtcggcgggttcgggagtttcgcggacgtgacgtcgcgggcggaagtgacgttttttcgcggttggacgcggcgtttagttgtcgggcgggggagggcgcgttcggttttttttaggggacgttgaaattatttttgtaacgggagtcgggagaggacggggcgtgtttcgacgtgcgcgcgcgtcgtttttttcggcgtttttttatagttcgttggttttcgtcgcggaaaggcgttatgtcgtttaaaatttttcgaaaaacggtcgttatcgtcgtcgttgtcgtcgcggaattttcggtatcgtcgtcgtcgtttttttttgaggaggatttagagtaggatagcggttcggaggatttgtttttcgttaggtgagcgagtagagtcgtcgtcgttttacgcgggaagggcgtttcgggtgtgcgtagggcgggcgtaaggcggttcggcggggattcgttttcgttaggggtcgggtttcggcgggaggaggcgttttttttgtttttcgttacggcggagcgtttgtagaatggtgataggattttgggtttttgggcgaggggtttcggttttaatttgataggtgtcgggcgggtggggttagggttttgagcgaagtgataggtgtagtttttttttgtgaggttcggaggtagagggtcgttgcgagcgtttattagacgtaaaaaatgaaaaataaaaatataaaaatggtgtttgtgggagagttttttatcggagaattggagtatttcggtggtcgtttgattttttgttttggtttacgcgatgtaatagttgggaagtattttttttcgggcgtgtattgtatttgaagtttatttgtgggagaggtcgattagaaagttttggataagaagcgtagggttttgagtgtttattgtttataggatattcggtttaggagttttgcggcgtttttttagaataataatgtatcgaggttttggggatttaaagttatttgtagtgattgatggagcgtaattttttagaggaattgaaatatgggtaaaatttttatgagatatttattagaagtgtttgaaagtttttaaattttttttttttttgtttgatgaattttttttgcgtgttagtcggtttcggtttgttttattattttttttattttgttttttgattttgaattagtaaggattttggtgttttttttttttgtttttgtttttggtataaaattagtggttttgtgcgtaaatggaaattttcgtttttttttattaagtggaatttaaatttaagtaagtttatacgaatgtattagattttgaagggaagtatttattgtattataatattttattttttttgatttttttattttatggttaaatagttatgattgaaagagtgtaattgttattattgttagtattggttttattttgagataagtttattgtagagggaatgggatttgtttttgttttttattatttttttttttatttttgtttattattaaatttttttatttttatttatttttttttattcggtatatattaataatttacggtagaaaagattgaagtgggatttaggaaatggtttttggaaggttattaaaaatttatatatttaaatggattgttttataggttagttaaaaattatattcgttaaaaaattaaaataataataataaaaaattaaaaattacgtttggggtatgttttgggaaaagatatggttttagtttttgattaaattttgatgtatttaatttttgtaaattttttttgggaaaatgtagtaatggttattttaaagaattttatgttatgtatatagttttggaagtatattttaatgtagggtaattaggaatattgacgttgtggttattgtttggaaaaaagaggattgttttttttattttttaatttattttatatattttaagtaatggaattataaaaaatttttttataagttaaaattatataagatatagtttgtttttgattatttatatttataaagggttttattaatatagatagttgaattttataaattaattagtaagggtagaattattgtcgtgtagtttgatattgagtattttgtttggagatggaattaaggtttagtttaattgtatttttagtgatagattttatttttgatttgagagtttagattttatttttgttgttttatttttggtttaagtaatgtagttggaagggaaattgttattaggaatagtatattatatttattgttgaaataattaaaggttaattatgtttcgagttgggtgtgatggcgcgtatttgtagtttatgttatttaggaggttgaggtaggaggattatatgagtttgggagttggaggttagtttgggtaataacgtaagattttagtttttaaaaaaataaaaaagttgattaggtatgttggtttacgttgtaatgttagtattttgggaggttaagatgggaagattgtttgaggttaggagtttgagaggagtttgggtaataaaataagattttgtttttaaaataaattttaaaaaattagttagtggttgtggtatatttgtaggtttatttatttaggaggttgaggtgggaggatttttgagtttaggagtttgagattgtagtgagttatgattttattattgtattttagtttggatgatagagtgaaattttattttaaaataagaaaaaaaaataaaaattaattatgttttgaaggaggaattggtagtttagaatagtggttaagggtatggattatagagttagattgttgggtttatatagtggtttattttttatcggttgagattttaggtaagttttttaatttttttaatttgatagatatttgtaaatgtttatttttatagatgagaatatttatttaaaagggttgatgtcgggatttagtgaaattatatgtttaaggtattttttataggattatagtaaatatttaaaaattattaattattttttatattatttttattagtagataatatatagaaattagatgaatgaaaatgaattagttaataagaatttattaaatgtttgtttttgttaaggggaaaggataaaaataagtagtcgtattatgtaagatgtgttagtaggtagagagatatatgaaatattgataagagaagattatagtttaataaagttattggcgttgaattgtataatattatttatgggtttttatttttttgttgttatttttattttatttttttaaatagttttagttattatatttatttttttttatagaagtgttttgttgttttgaagtatatttgatttattatgtaagtaaatattttttattgtgtggtatttttattttggaatgattatgaaaaagataattatatgtttaaatttgaagtgtaatgtttttttaagataaaataagattttaaagtatttaataatgtttttttttatagtagtgttatgtgtaaattattgaaataagtatgtattgaattaatttgatttataagtatatgttaattatatgattatttttatttggtagg

SEQ ID NO: 144 - DNA, 8404 bp, Artificial Sequence
  chemically treated genomic DNA (Homo sapiens)
tttattaaatgaaaataattatataattggtatatatttataaattaaattgatttagtatatatttgttttaatagtttgtatataatattattgtgaaaaagaatattattaaatattttaagattttattttattttagaaaaatattatattttaaatttaaatatatgattattttttttatggttattttaaaataaggatattatatagtgaaaaatatttgtttgtatggtaagttaaatatattttaaagtagtaaaatatttttgtgaaggaaagtaaatgtaatagttaaagttgtttgggaaaataggataaagataataataaaaagataaaaatttatagataatattatataatttaacgttagtgattttgttaaattgtagtttttttttattaatgttttatatatttttttatttattagtatattttatatgatgcgattgtttatttttgttttttttttttaataaagataagtatttaataaatttttgttggttaatttatttttatttatttaatttttatgtgttatttattaataagaatagtatgaagaataattaataatttttgagtatttattatgattttgtagaaagtattttaaatatatggttttattgaatttcgatattagtttttttagataagtatttttatttgtaaaagtagatatttatagatgtttgttaaattggagaagttaaagaatttatttgaggttttagtcggtaagaggtaaattattatgtgagtttaatagtttaattttataatttatgtttttgattattattttagattgttaattttttttttaaaatataattagtttttgttttttttttttgttttgaaatagggttttattttgttatttaggttggggtgtagtggtgaaattatggtttattgtagttttaaatttttgggtttaaggatttttttattttagttttttgagtagatgagtttataggtgtgttatagttattggttaattttttaaaatttgttttagagatagggttttgttttgttgtttaggttttttttaaatttttggttttaagtaatttttttattttggttttttaaagtgttggtattatagcgtgagttaatatgtttggttagtttttttgtttttttaaagattggggttttgcgttgttgtttaggttggtttttaatttttaagtttatgtgatttttttgttttagttttttgagtagtatggattataggtacgcgttattatatttagttcgaaatatgattaatttttgattattttaataatgaatgtggtatgttgtttttagtgatagttttttttttagttatattatttaggttagagataaggtaatagaaataagatttaaatttttaaattaggaatggaatttgttattggaggtgtagttggattgagttttgattttatttttaggtaagatgtttagtattagattgtacggtagtggttttatttttgttggttaatttatagagtttaattgtttatgttaatgaaattttttgtgggtatggataattaagaatagattgtattttgtatggttttgatttataagagaattttttatagttttattatttaaaatatataaaatgagttaaaaaatgaaagaaatagtttttttttttttaagtagtggttataacgttaatatttttggttattttatattagagtatgtttttaaagttgtgtgtataatatggaattttttagagtagttattattgtatttttttaagggaaatttgtaagaattggatatattagaatttaattagaaattaaagttatgtttttttttagaatatgttttagacgtggtttttaattttttgttgttgttattttggttttttaacgaatatggtttttaattgatttataagatagtttatttaaatatataaatttttaatagttttttaggggttattttttaaattttattttaattttttttgtcgtgaattgttagtgtatatcgagtggaaagaaatgggtgagggtgaaaggatttggtgatagataagaatgggagagaaaatagtgaaaaatagaaataagttttattttttttgtaatgaatttgttttaaagtagaattagtgttgataataatgataattatatttttttaattatagttatttaattataaagtagaaaaattaagaaaagtaagatgttgtaatataataaatatttttttttaagatttagtgtattcgtatggatttgtttaaatttagattttatttaataagggaaaacgaaaatttttatttgcgtatagaattattaattttgtgttaaaaataaaggtaaaaagaggggatattaagatttttgttggtttaaagttaaaaggtaaaatggaagaaataatgagataagtcgaagtcgattaatacgtaagaagagtttattaaataggaaaaaaaaaagtttagaaatttttaagtatttttggtaaatgttttatgaaagttttgtttatgttttagtttttttaaagagttacgttttattaattattatagatggttttgagtttttaaggtttcgatgtattattgttttaaggaaacgtcgtaaagtttttgagtcgagtattttgtgggtaatggatatttaggattttgcgttttttgtttaaggttttttggtcggttttttttataaatggattttagatgtagtgtacgttcggaagaaaatattttttaattgttgtatcgcgtgaattaaaatagaaagttagacgattatcggagtattttaatttttcggtgaaaaatttttttatagatattatttttgtatttttattttttattttttgcgtttgatggacgttcgtaacgattttttgttttcgagttttataagagggaattgtatttgttatttcgtttaggattttagttttattcgttcgatatttgttaagttgaagtcgagatttttcgtttaagaatttagaattttgttattattttgtagacgtttcgtcgtggcggggggtagggagggcgttttttttcgtcgggattcggtttttggcgaggacgggttttcgtcgagtcgttttgcgttcgttttacgtatattcggggcgtttttttcgcgtgaggcgacggcggttttgttcgtttatttgacgagaggtaggtttttcgggtcgttgttttgttttgggttttttttaggagggggcggcggcggcggtgtcgggggtttcgcggcggtagcggcggcggtggcggtcgtttttcggggggttttgggcggtatgacgttttttcgcggcgggagttagcgagttgtggaggagcgtcggggaggacgacgcgcgcgtacgtcggggtacgtttcgttttttttcgattttcgttataaaaataattttaacgttttttgagaaaaatcggacgcgttttttttcgttcggtaattgagcgtcgcgtttaatcgcgggaaaacgttattttcgttcgcggcgttacgttcgcgaggttttcgggttcgtcggcgtttgtggggaattggggcgttggtcggtgcgcgggttgggacgttaagttatgaggaattaaattgggaaatttggcgtgggtttaggcgttttttaggaggtattcggcgcggttcggacgtgtttttatttagaattattttttttaggtcggggtgtatttaacggggttatataaagagtttggtgggtgattgtgggttttatttttatttcggggtttgatagggaagattttcgggtttcgtagggaatatttggttagtgtattttcggcgggagcgttattttttttttttggcggcgttttttattttttatttcgtttaattcgttttgtaaagtcggttaaaataaaaataaatttggagcgttgataggtgcggaattttattagttatttagaagatagaaaatgttagatatttgttggttttttgggattattggttagggaaaggaagggagggagttgtggggaatgaacggatagtagtgtaataaaggattgtagtggtgtaagaacgggaagtatcgtggaaacgtttgaggaagatttttaggggagtagtagttgttgaatagaagtttgttaggtaggtttgatatttattatgtattaggaattgtgttggttattttatataattgttttatttaatttttagaaatagttttttttttttttttttttttttttttttttttttttttttttttttattttaagtttcgggatataagtgtagaacgtgtaggtttgttatataggtatacgtatgttatggaggtttgttgtatttattaattcgttatttaggttttaagttttgtatgtattagttaagaaataacgttttttaatgggtagtattagttagtttacgttgtagatgaggaaataggtttagaggagttaatttgtttaatattagggtcgatgggtagtagagaatttgaatttaattttatttgattttatttgtttattatattatgtttgatgaagaaaatagtgatagagaaggagtatgtgtaaaggtataaagatattagaaaagagtttgttgggattattattattaaatattggtttaaagttgttattatttttgtgtttcggtatttgtattaatagattatttagtttgaatatatttttttttttttttggtagatattgttattgtttatttgaattcgttaattgagaaggaaagagatggtttatgttgtgaataaaatatagttgtgttgtgatgtaaatttttttattttggagtagttgagtaaggtttaaggtaggaagaatttttaagtaggttatgttgtaagttttttgagtttattttagtaagttgtataagggattatttttttatttgtatattatgatatatgtgaggatgtgtaaaggtttggtaagtattggtttatttaatagttatttttatttaattttagaaattttttttgtgggtaaatgttaggagatagtttaggtttaggtttagttataaagaatgaatataattaaagtgttatttttatttattttattttagattagtttaggtaagagtttaggatgtagttttgatatttgaaagataaggagtagtttgttgggagtttgataaattgaaatagggatggtatagttttaaatattattaaataatagtaataatattaagtattattgaggatgtgatatttttgattgttgtagttattgtaacgtgaggtaagttattttatagagaaggtagaaatgttgatattggtgtaggaggaattttaaaagaatttggatttttagtgttataaatgagtttttgatttggttagttttggagttgatttaagttgagttgaggtttttatttgtttgtaatagaaagtattatgattgataatgttttttttgtgtttatttttaggatagagattaaattttgggtattattattgttttagtatttagtatagtgttatatatatagtaaatgtttgtttattaaaagtagggatggtaggaaagtgaaggaaagttttaggaattgaagtaaattttttttatacgtagatattatttgttttatttaaaattagtttattaatatttagattatatttatgtaatttagatttatttattattatattataattatgataaagagattttttaatttataaaagaatatatgttttgattatggattaatttaattatgtttattagtatgtaaaatatatttttttgtagttataaaaaggaatgagattatgttttttgtaggaatatggatggagttagaagtttttatttttagtaaattaacgtaggaatagaaaattaaatattgtatgtttttatttataagtgggagttaaataatgagaatatatggatatgaagaggggaataatatatattgggggattatttgagggtgtagggtgagaggatagaagattaaaaaattatttattaggtattatatttgttatttgggtggtgaaaaaatttgtatatattaaattttagagatatatagtttatttatataataaatttgtatatgtatttttaaatttaaaataatagtttgaaaaaagtgtggtgtatatattataatatatatatataaatagatatatatatatatatatatatatatatatatatatatatatatatatatatattataaaatagatttaggaaggggaataatatatattggggtttgtagcggggaagggtggggagagggagagtattaggagagttaatggatgttgggtttaatattatggtgatgggttgatttgtgtagtatattattatagtatatatttatttgtgtaataaatttgtatattttatatatatatttgggagtttaaaagttgaaggaaaaaataataaaatatatttttatttatataatttagaagtaattgagtttattattaaaatttttagttttttgttgtattattaaagaagtattagaatttcggtagagtttagattaggtacggtggtttacgtttgtaattttagtagtttgggaggttaaggcgggtggattatttgaggttaggagtttgagattaggttggtaaatatggtgaaattatatttttattaaaaatacgaaattagttgagtgtggtggtaggtgtttgtaattttagttattttggaggttgaggtaggagaattatttgaatttaggaggtagaggttgtagtgagttgagattatgttattgtattttagtttatgcgataagagtaagattttattttaaaaaatatatatatatatatatatatatatatatatattgaatatgtttatttagtttgaatggtgtaaaattgatttgaagttttgattatttttgttaattattttgttttattgatttgttaaatattgatagcggggtgttaaagttttttattattattgcgtgggagtttaagtttttttttttttttttaaggattcgttttatgaatttggtagtttttgtattgggtgtatatatatttaggataggtagttttttatgttgtattgatttttatattattatgtaatgttttttttgtttttttttgatttacgttggtttaaagtttgttttattagagattaggattgtattttttgtttttttttttttttgttttttattgttgtggtaaatttttttttatttttttatttagagtacgtgtttttgtatgtgagatgagtttgttgaatatagtatattgatgggttttgattttttatttaatttgttagtttgtgttttttaattgtggtatttagttcgtttatttttaaggttaatattgttatatgtgaatttgattttgttattatgatgttagttagttagtttgtttattagttgatgtttattagtttttttatagtgttaatggtttttataatttggtatgtttttgtagtggttgggattaattttttttttttatatttagtgttttttttaggagtttttgtaatgtaggtttggtggtgataaaattttttaatatttgtttatttgtgaaggattttatttattatttatttataaagtttagtttggttggatataaaattttgggttgaaaatttttttttttaagaatgttgaatattggtttttattttttatggtttgtagggtttttgtagagagatttattattagtttgatgggtttttttttgtaggtaattcgattttttttttggttgtttttaatatttttggttttattttaattttggtgaatttgacgattatgtgttttggggttgttttttttgaggagtatttttgtggtgttttttgtattttttgaattggaatgttggtttgtcgtgttaggttggggaaatttttttggataatattttgaagagtgttttttaatttggtttaattttttttgttatttttaggtatagggataattaaatataggtttggtttttttatatagttttttattttttggaggttttgttcgtttttttttatttttttttttttaattttgtttttatattttattttataaaggtgatttttaatttttgatatttttttttttgttttggttgttgatatttgtgtatgttttacgaagtttttgtgttgtgttttttagttttattaggttatttatgtttttttttaaattgtttattttaggtagtaatttttttaatttttttttaaggtttttagtttttt

SEQ ID NO: 145 - DNA, 5312 bp, Artificial Sequence
  chemically treated genomic DNA (Homo sapiens)
gtcggtttcgggggtcgacgatttttcgggtaggcgacgtgttttgtttaggttttatttttcgcgttcgtaaaacggggtggataacgtagtttaaggtagagtcgcgttaaggtttttcgttgtcgtcgggttttggcggtttgatcgggtttggggttcgagcgtgttttcgggtttgggggggtcgtcgcgatggattcgttggtagcgttttaggatcgtttggtggagtagttgttgtcgtcgcggatttaggtttagaggcggtttaaggtgcgtgtgtggagagggcggaacgtgggtttgtgatttcgcgggtttcgggattcggtatggggttttcgttttcgcgcgttacggttcgttagcgtttaggtttagttttttttttcgtagcggtttcgtaggttcgcggttttacggtggggcgacgtgttttgtttaggttttattttacgcgattttaaaacgcggcggagaatgcggtcgtgggatttttttaggggttttaagggtttgcgggggttgggcgtttgggcgcgcgggcgggggaggttcggcgtcgcggtttataaataggcgttgtttcgttatcgtcgttgtcgtcgttttcgcggttggattcgggttaggtggggtttttcgttttttggtatttttcggaggggtgagtgtcgaggtttttagttttttcggtttatggagggttttgagtgtgttttaggggttttaattttgttgttttttgttcgaggagggaggatatcgtttgtgtttgttgcggtttgatatttttttacggaataaatatagtgtcggtttttgtagagttttttttgggattggggttaggggtgtttttttttgttattatttcgtttgtttttttatttttaggtttttgtttacgggttttttttttatttttgttaacgaaatgttttattttgggaatcgtattttttgttgtttttttatatcgtatttggtaagagatagggtattgggtttttggagaaatttttgtgtttttattttgttttattttgtttttaggatattgataagtagtacgtgggtttcgttatattgtttaattaggtgtatcgtaagtcggtgaagaaaggttttgattttatatttatggtggttggtgagtgggttaggtttttcgggggagtggttggggttattggttagttaagttttgtcgttggagttttagatttaacgtagttttttttttgtatttgtgtgtaggtgagttaggtttggggaagtttatattggtttatagtttttttttgatagatttgtataaggatcggaagttgtttagtgttgagggtgagtggtttttaggaggttttggtattgatttttagtttttttttatgggatttttttaaggatttttttttaggtttagtttttattgttttgttttcgcggtgtgggttttttgggggtagggttaaggtattaagatggatgaggacgagggttttggttgttaagggtgaggggttgagggttggagaggtttttttagtggtttttttttcgtagagcgtattagttagacggtagagattttaaaatatacggtggatattgaggagaagggagttaagttgaagtttattatcgtggatacgtcgggattcggggacgttgttaataatatcgagtggtgagtgaggtttgttgagaaaggttttgtttaggcggttatagtattcgaggtttggttttattttttttttgtttatagttggaagtttattatcgattatgtggattagtagtttgagtagtattttcgtgatgagagcggttttaatcgaaagaatatttaagataatcgagtgtattgttgtttatattttattttttttttcgggtatgggtgtgtggttgttttggggttaggttcgggagtgtagtttttataatatggttttttggttgtgtttatgtttatttttggttgttttcggtaggttgcggttagtggatgtgggttttatgaaggtattgtatgagaaggttaatatcgtgttttttatcgttaaagttgattgttttgtttttagtgagattcggaagttgaaggagcgggtgagtttgtcgtcgtataggggtttggttagggttttggggttgagagtattagggggatttgtttggttttaaatttgatggtttttgttttattatagattcgggaggagattgataagtttgggatttatgtatattagttttttgagtgtgattcggacgaggatgaggattttaagtagtaggatcgggaattgaaggtgaatatgtagattggtggggtaggggggatggagttggtgaggggtagaattagagggttttgttttttttatattgagtttgttggaggagggttaggttagtttagttgggtgtaagagttatttgttttaggagtagaggatttgtattttttttatttagggttagaaggtaaaggttattatgtttttgtttggttggggtgggttatgtgggtttcgtgtggtgtttggtaggtatggagtatttgtttagatttagaggtgtagtagtgggttaggtttttaattttaattttttttttatgggttattagaggaaggggttgttttagtggtatattttggtttttagatttttgagttttagggttggtggttttgggtgtttcggtagttagagtgatgatggagattatgttaggggtaggtggttattagggtaggggtattagtatggggagatataggtttagttttggggagggaaggggtagttggagggggtggtttttgatgagggaggagatgaggagggagtatgtttggttgggtatagtttggaaaggttttggaatgtgagttatatgggttttggttttagttaggggtagagaggttagaaaggggtaacgttaggatttttttgaggagagatagttgatggtgatgttggaggggtgtttcgggagttatatgttcgttttttattagtaatcgtgtaattacgtttatcgggtgtgagttttttttttttttttttttaggagagcgcgtttttcgtcgttataggtagtaatacggtggtggaggttaaggggtagcgggttcggggtcgattgtatttttgggggatcgtggagggtgagtagagttttggggtattaggtttggtgggggaaggttgttttgggtcggcgttagtttattatttatttttatttcgtagtggagaattaggcgtattgcgatttcgtgaagttgcgtaatatgtttattcgtacgtatatgtacgattttaaggacgtgacgtgcgacgtgtattacgagaattatcgcgcgtattgtatttagtagatgattaggtgcgcgttttagtcgcgagttagatttcgtttttttggtttcgtttacgtttttataattgagggtcggttttgttagtttatttagatttgaattttgtattattttttaagtttttttttttttttagagtttggtttttttagaattaagtttagggttgtgagggtttcggagggtagggttttagtagtggcggggatgggttaggtatcgttagtttacgttgagtttttcggtggcgtcgtttcgtttattttttttttcgtttcgcgtagtaaattgatttaggatagtcgtatggagagttttatttcgattttgtcgttgtttatttcggacgtcgagattgagaagtttattaggatgaaggatgaggaagtatgtggggcggcgggggcggcggaggcgggcgttagggatgttttttcgcggtgttgtttattcgtcgggttgttttcgttcgtagttgaggcgtatgtaggagatgttgtagaggatgaagtagtagatgtaggattagtgacgttcgtcgcggatatatcgttcgttttcgggacgttttcgtatttttggatattagatcggattgttttcgattcggagacgcggggttatagtttttagttgattttaatttatttttagtattatttttttttaggttattgtgtttgttttcgaggggtttggatcgtagttttcgtttagttggttttttttgattttgggggattaggagcgaagttgggcgggattttagagattcgttttttttgtttttttttcgttttcggacggttatagtatttaaatcgtaggttttgttttggtaggtaggtaaagttaggtagaagaggatttttaggattttgggtttgttttttgttttagtgttgtagaacggatttgggagtttttttttgtttgttttcgcgggttatttagcgagtgttgagattttattttttgtcgaggcgggtcgagtttttttttatttttagacgtttagcgggtagggttgggttgaattaaatgggagttttttagatataaggaggttagaggttgtaaggagcggggtcgtgatcgtttatattttttttttatagttcggttcgatttggagggttttcggggtattgggcggtgagttattttttggtaattttcggtgtcgttttttgttttcgttcgaggttttttttttttagtatcgttgtggtgtgtcgggattttgagtttaggtttttcgatgtttttattcgtatgattttttttcgttatacgatgtttcgttttttttcgttgtgaatgtcgcgttttgttttggtgataggagaataatgttggtgaacgtcgtagcgggtgttcgagtgtttcgtgtgtttttgagagcgggtgggagcggaagtttgagcggtttgcggttttcggcgatagtgtgttatttgtcgttgtagcgcgcgttcgcgcggtttttgggttatttttggttaggtcgtagtattgtggtcggtgcgggcgtggtaggggcggggcggttttatcgttcggttttttcgtttacgtttttcgttgtagagtaagtcgggttgtcgttttttcgttatgggtttcggtgagtttggagttcggtcgggttttcggttgttttttaggtcgattcgggttgagaggagttttggtcgtttggttgtagttgggagagatttgggttagatttagaggggatttttagtcggcgtgcggggtggttagggtggagaggttggcgggttatcgggacgtcgggtattaggggttggatggagtcgggtcggtagtttgggtatttagagatgtcgtttaggtgttcgtcgatcgttcggtttattgcggcgttttttttgtagg

SEQ ID NO: 146 - DNA, 5312 bp, Artificial Sequence
  chemically treated genomic DNA (Homo sapiens)
tttgtaagggaagcgtcgtagtaagtcgagcggtcggcgggtatttgggcgatatttttgagtatttagattgtcggttcggttttatttagtttttgatgttcggcgtttcggtagttcgttagtttttttattttgattatttcgtacgtcggttggaagttttttttaagtttgatttaagttttttttagttgtagttaaacgattagagttttttttaattcgggtcggtttagggagtagtcgggggttcgatcggattttagatttatcggagtttatggcgagaagacggtagttcggtttattttgtagcgggaggcgtaggcgggagagtcgagcgataaggtcgtttcgtttttgttacgttcgtatcgattatagtgttgcggtttggttagaaatagtttagaggtcgcgcggacgcgcgttgtagcggtagatagtatattatcgtcggaggtcgtaggtcgtttaggttttcgtttttattcgtttttaggggtatacggagtattcggatattcgttgcgacgtttattaatattgtttttttgttattaggataggacgcggtatttataacggaagaaaacggagtatcgtgtggcgggaagggattatgcgggtgggaatatcgggaggtttaggtttaggatttcggtatattatagcggtgttggggagaagaggtttcgagcgagggtaggggacggtatcgagagttgttaggaggtggtttatcgtttagtgtttcgggggttttttaggtcgggtcgggttgtggagaaggggtgtaagcggttacgatttcgttttttgtagtttttggtttttttatgtttggagggtttttatttgatttagtttaattttgttcgttaggcgtttggggataagggaagattcggttcgtttcgatagaaaatggggttttagtattcgttgggtgattcgcgggagtaggtaaaggagggtttttaagttcgttttgtagtattggggtagggaatagatttaggattttgggaatttttttttgtttagttttgtttgtttgttagagtagggtttgcggtttgggtgttgtgatcgttcgggggcgggggaagggtaagggaggcggatttttgaagtttcgtttaatttcgtttttgattttttaaggttagagagggttagttgggcgggggttacggtttaggtttttcggaaatagatataatgatttgggagggggtggtgttgagaataaattagggttagttgggggttgtggtttcgcgttttcgggtcgggaatagttcggtttggtgtttaggggtgcgagggcgtttcggagacggacggtgtgttcgcggcgagcgttattggttttgtatttgttgttttattttttgtagtattttttgtatgcgttttagttgcgggcggagataattcggcgggtgagtagtatcgcggaggagtatttttgacgttcgttttcgtcgttttcgtcgttttatatatttttttattttttattttgataagttttttagtttcggcgttcggggtgggtagcggtaggatcgggatggggttttttatgcggttgttttgggttagtttgttgcgcggggcgggggggaggatgggcggggcggcgttatcgggaggtttagcgtgggttggcgatgtttggtttattttcgttattgttgaggttttgtttttcggagtttttatagttttggatttggttttagggagattaggttttgggggagggggggggtttagggaatggtgtaaagtttaagtttgggtgggttgataggatcggtttttagttatggagacgtgggcggggttagaggggcgaggtttggttcgcggttggggcgcgtatttggttatttgttggatgtagtgcgcgcggtagttttcgtagtgtacgtcgtacgttacgtttttgaggtcgtgtatatgcgtgcggatgagtatgttgcgtagttttacgaagtcgtaatgcgtttggttttttattgcggggtgggggtgggtagtgggttggcgtcggtttaggatagtttttttttattagatttggtattttaagattttatttattttttacgattttttaggggtatagtcggtttcggattcgttgttttttggtttttattatcgtgttgttgtttataacggcgaagggcgcgtttttttgggggaaggagggagaaaggtttatattcggtgagcgtaattgtacggttattgatgggaaacgggtatgtaattttcggggtatttttttagtattattattaattatttttttttaaagagattttggcgttgtttttttttggtttttttgtttttggttggagttagagtttatgtggtttatattttagggtttttttaggttatgtttaattaggtatgttttttttttatttttttttttattaagaattattttttttagttgttttttttttttttagggttgagtttatgtttttttatgttgatgtttttgttttggtggttatttgtttttggtatggtttttattattattttagttgtcggggtatttaaagttattaattttggagtttagaaatttgggagttagggtgtgttattggggtagtttttttttttggtgatttatgggaagagggttggggttgggggtttggtttattgttgtatttttggatttgggtaagtgttttatatttgttaagtattatacggggtttatatgatttattttagttaggtaaagatatggtgatttttattttttagttttggatgaagggggtataggttttttatttttagaataaatgatttttgtatttaattgggttgatttggtttttttttagtaggtttaatgtgaaggagataaagttttttggttttgttttttattagttttattttttttgttttattagtttgtatgtttatttttagttttcggttttgttgtttgaagtttttattttcgttcgagttatatttagggaattggtatatatggattttaaatttgttaattttttttcggatttgtggtggggtaaggattattagatttgaggttagataagtttttttggtatttttagttttagggttttggttaggtttttgtgcgacggtaggtttattcgtttttttagttttcggattttattggggataagatagttagttttggcgatgagaggtacgatgttgatttttttatgtaatgtttttatgaaatttatatttattggtcgtagtttgtcgagagtagttaagggtgggtataggtatagttagggggttatattgtaggggttgtattttcgagtttggttttaggatagttatatatttatgttcgaagggggagatgaagtataggtagtagtgtattcggttgttttggatgttttttcggttgaggtcgtttttattacggaagtattgtttaaattgttggtttatatagtcggtgatgggtttttagttgtgggtaggagggaggtgaggttaggtttcgagtgttgtggtcgtttaggtaaggttttttttagtaggttttatttattattcggtgttgttgatagcgttttcgaatttcggcgtgtttacgatggtgagttttagtttgatttttttttttttaatgtttatcgtgtgttttagaatttttatcgtttggttgatgcgttttacggggaaggggttattggaagggtttttttaatttttagttttttatttttggtagttaggattttcgtttttatttattttggtgttttggttttatttttaggggatttatatcgcgagaatagaatagtgggagttggatttgaaagggagtttttggagaggttttatggaaggggattggggattagtgttagggttttttgggggttatttatttttagtattgagtagttttcggtttttgtataagtttgttaggaagaggttgtggattagtgtggatttttttaggtttgatttatttgtatataggtatagagaaggagttgcgttaggtttggggttttaacgatagagtttggttggttagtgattttagttattttttcgaggagtttggtttatttattagttattatgagtgtgaagttaaagtttttttttatcgatttgcggtgtatttggttgggtagtgtggcgaagtttacgtattgtttgttaatgttttggggataggatggaatagggtagggatataaaggtttttttagaagtttaatattttgttttttattaaatgcggtatgaggagatagtagagggtacggtttttagggtggggtatttcgttggtaaaaataaggggagggttcgtgggtaaaagtttggagataagaaggtaggcgaggtggtggtaggagaaggtatttttggttttaattttagggagggttttgtagggatcgatattgtatttatttcgtggggagatgttaggtcgtagtaggtataggcgatgtttttttttttcgggtagagggtagtaggattgggatttttgggatatatttaaggttttttataagtcggagaagttgggggtttcgatatttattttttcggagagtgttagggggcgggaggttttatttggttcggatttagtcgcgggggcggcggtagcggcggtggcggagtagcgtttatttatagatcgcggcgtcgagtttttttcgttcgcgcgtttaggcgtttagttttcgtagatttttggggtttttggaggggttttacggtcgtatttttcgtcgcgttttggagtcgcgtgaggtgaggtttggatagggtacgtcgttttatcgtggggtcgcggatttgcgaggtcgttgcggagggaagggttgagtttaggcgttggcgggtcgtggcgcgcggggacggggattttatgtcgagtttcggagttcgcggggttatagatttacgtttcgttttttttatatacgtattttgagtcgtttttgggtttgggttcgcggcgatagtagttgttttattaggcggttttggggcgttgttagcgagtttatcgcggcgatttttttaggttcgggggtacgttcggattttaggttcggttaggtcgttagagttcggcgatagcgagggattttggcgcggttttgttttaggttgcgttgtttatttcgttttgcggacgcgggaagtgaggtttggatagggtacgtcgtttattcgggggatcgtcgattttcgaggtcgat

SEQ ID NO: 147 - DNA, 3025 bp, Artificial Sequence
  chemically treated genomic DNA (Homo sapiens)
tttttacgatttgatttttatagtcgttttatttatgggttttttataaattaggggtatagaggagtattgaaagttagtttagaggtgagcgcgcgtagttagcgtttttcgcggatatagtagtcgggtgttggagaggtttggaaagggcgtgtcggagagttaagtgttagtcgtttagggtttgtcggtcgttttttttttttttgttcggtaggggatttagcgcgtacgttagtgtggaggggcgggttggttggttagtttcgggtttttcggttatttcggggattttttttaagtttcgttttcgagtgtttttattggtttcggatttttttttttttagttgttcgtttgggtttcggggcgtttaggttattacggataaatagtttagggcgtttggtcgagaagttaggggtgaggaagttttggggcgttgtcgtcgttttttttaattataaattaggtcggataggagagggaggggtgggggatagtgggtggggatttagattgttagtattttgttatttatagtcggggttttcgagcggtagaaagtttcggttattttttgtcgtttgggttgggcgaaagttaggatcgtgtcgcgttatcgttaggatatggagttattgtcgttatcgtttcgcgacgtagatttgacggttttcgacggttttttttgtttttttgttataacggacgatttttatgacgattcgtgtttcgatttttcggatttgcgttttttcgaagatttggattcgcgtttgatgtacgtgggcgcgtttttgaaattcgaagagtattcgtattttttcgcggcggtgtattcggtttcgggcgtacgtgaggacgagtatgtgcgcgcgtttagcgggtattattaggcgggtcgttgtttattgtgggtttgtaaggcgtgtaagcgtaagattattaacgtcgatcgtcgtaaggtcgttattatgcgcgagcggcgtcgtttgagtaaagtaaatgaggtttttgagatatttaagcgttgtacgtcgagtaatttaaattagcggttgtttaaggtggagattttgcgtaacgttattcgttatatcgagggtttgtaggttttgttgcgcgattaggacgtcgcgttttttggcgtcgtagtcgttttttatgcgtcgggttcgttgttttcgggtcgcggcggcgagtattatagcggcgatttcgacgcgtttagttcgcgttttaattgtttcgacggtatggtaaggtcgggattttaggaagtgaggaagttagggcggcgttcgggatattagggacgcgttttcgagggcggggagttggttttgcgggaggtttgggttaggatttttttcgagagagaggatttttttgttttgggtagttgttattggggtagtttgttttggaagtgtgcgggtaagcgttcgagttgttttattgggggcgttattagaatattgtagcgcgaacgtgaagatttttttttttatttatttttatttttaaaatgtaaatttgcgttttttggtgattgttcgtttttggtttggttttgtatgttgtagattttattttttatttattcgtaattatttttttaattaggataggtttgggttcggaattagagttttaggttagagttagggagggggcggttataggaattggtgttcgggtttcgagtcgtttcgcgggtttgatttagtcgtttttgttgtttgtagatggattatagcggtttttcgagcggcgttcggcggcggaattgttacgaaggcgtttattataacgaggcgtttagcggtgggtatttcgggtttttttttgttcgtttttttttttttatggagttgttttggtttttatttaggacgtttttatttttatttatatacgtttatgttttgggaagtggtgtaggagatgaaatattaagtaagtagttttttgttttttcgattgtttcggattttaattaaagtttttagtttttaatttgttttaaagtattgggttcgggggtgggaggtttgtcgcggttttatttttgtttattaatcgagtttttttcgcgtagaatttaggttcgggaagagtgcggcggtgtcgagtttagattgtttgtttagtatcgtggagcgtatttttatcgagagttttgcggcgttcgtttttttgttggcggacgtgttttttgagtcgttttcgcgtaggtaagaggttgtcgtttttagcgagggagagagtagcggcgattttatttagttatcggacgtcgtttcgtagtgttttgcgggtgcgaattttaattcgatatattaggtgttttgaggggatggtggtcgtttattcgttcgagggatggtgtttttagggtttttcgcgtttaaaagattgaatttaaatgttttttttttaatagcgttttaaaagcgattttttttgaggtaggagaggcgggagaattgaagttttcgttttcgttttatagggtaaggatatagcgcggttttttttacgtagtatttttttcggagatttattgcgatggtcgtttcgtgtttttcggtgggttagagttgaattttgaggggttaggtttagttttttcgcgtttttttttatgggggtgagattttcgtagatttaattttgtttcgggatgtatcggttatttgggggggcgtgagatttagtgtatttcggttttaaatgtagtaggtgtaatcgtaatttatttttaattcgtttttcggtttaggattattttttgtaatatttttgtaatttatttttgtaaataagagttgttttgttagagtaggagtttttggggttgtatttatttttgaggtatggtgtgtggtgttatagggaatttgtacgtttatatcgtaggcgggcgagtcgcgggcgttcgtttaggtgattaaaataaaggcgttaatttatatcgtcgtggtttcggttttttttggatatgggtgtgggattt

SEQ ID NO: 148 - DNA, 3025 bp, Artificial Sequence
  chemically treated genomic DNA (Homo sapiens)
ggattttatatttatgtttagggaaagtcggagttacggcggtataaattagcgtttttattttgattatttgagcgagcgttcgcggttcgttcgtttgcggtataaacgtataaattttttgtagtattatatattatgttttagagataaatatagttttaggggtttttgttttggtaaagtaatttttatttataggaatagattataaaagtattataaaaagtggttttgaatcgggaaacgggttgggggtgggttacggttatatttgttatatttgggatcggagtgtattgggttttacgtttttttaaataatcggtgtatttcggggtagggttaggtttgcgagggttttatttttatgggggagggcgcgagaaagttgaatttagttttttaaggtttagttttggtttatcgaggaatacggagcggttatcgtaatgggttttcgagaagggtgttgcgtggaaaaaatcgcgttgtgtttttgttttgtggggcgggggcggaaattttagttttttcgttttttttattttaagagaagtcgtttttaaagcgttgttgggaggggggtatttaagtttaattttttgggcgcgagggattttaggggtattatttttcgggcgggtgggcggttattatttttttagagtatttggtatatcgggttggggttcgtattcgtagggtattgcggggcggcgttcggtgattgggtggggtcgtcgttgttttttttttcgttgggggcggtagttttttgtttgcgcggaggcgatttagaaggtacgttcgttagtaggagggcgggcgtcgtagggttttcggtggagatgcgttttacgatgttggataggtagtttaggttcgatatcgtcgtatttttttcgggtttgggttttgcgcggggagggttcggttagtaagtaggggtggggtcgcgataagttttttattttcgggtttagtattttgagatagattggaaattgaggattttagttagagttcgggataatcgaaaagatagggagttatttgtttagtattttattttttgtattattttttaggatataggcgtgtgtgagtgggggtgggagcgttttagatagaggttaggatagttttatgaaggaggaggagcgagtagggagaggttcggaatatttatcgttgggcgtttcgttgtagtaggcgttttcgtagtagtttcgtcgtcgggcgtcgttcggggggtcgttgtagtttatttgtaaatagtaagggcgattgagttaggttcgcgggacggttcgaggttcgaatattaatttttgtagtcgttttttttttaattttagtttaaggttttagtttcgggtttagatttgttttggttgggggggtaattacgggtgggtaggagatgaggtttgtaatatgtagggttaaattaagggcggatagttattaaggggcgtaaatttatattttggaagtagggataagtagagaaaaagatttttacgttcgcgttgtagtgttttaatagcgtttttaatggggtagttcgaacgtttgttcgtatatttttaaaataggttattttagtgatagttgtttaggataagggggttttttttttcgggaaggattttggtttaaatttttcgtaaggttagtttttcgttttcggaaacgcgtttttgatatttcgagcgtcgttttaatttttttattttttggggtttcggttttattatgtcgtcggagtagttggagcgcgggttggacgcgtcggagtcgtcgttgtagtgttcgtcgtcgcggttcgggggtagcgggttcggcgtatagaaggcggttgcggcgttagggggcgcggcgttttggtcgcgtagtagagtttgtaggttttcgatatagcggatggcgttgcgtaggatttttattttgggtaatcgttggtttggattgttcgacgtgtagcgtttgagtgttttaaaggttttatttattttgtttaggcggcgtcgttcgcgtatggtggcggttttgcggcggtcggcgttggtggttttgcgtttgtacgttttgtaggtttatagtaggtagcggttcgtttggtggtgttcgttgggcgcgcgtatatgttcgtttttacgtgcgttcggggtcgggtgtatcgtcgcggggaagtgcgagtgtttttcgggttttaggagcgcgtttacgtgtattaggcgcgggtttaggttttcgaagaagcgtaggttcggggagtcgaaatacgggtcgttatagaagtcgttcgttgtggtaaaggagtagagagagtcgtcgggggtcgttaggtttacgtcgcggagcggtggcgatagtagttttatattttggcggtggcgcggtacggttttggttttcgtttaatttaagcggtagagagtggtcggaattttttgtcgttcgggagtttcggttgtagatagtaaagtgttggtagtttgaatttttatttattgttttttattttttttttttttgttcggtttgatttgtggttaaggaaagcggcggtagcgttttagggtttttttatttttagtttttcggttaggcgttttgggttatttattcgtagtagtttaaacgtttcggagtttaggcgggtagttgggggagggggagttcgaggttaataggaatattcgggggcggggtttggggggggttttcggggtggtcgaggggttcgagattggttagttagttcgtttttttatattggcgtgcgcgttaggttttttatcgggtagggagggagggagcgatcggtaagttttaggcggttgatatttggtttttcggtacgttttttttaaatttttttaatattcgattgttgtattcgcgggaaacgttggttgcgcgcgtttatttttgagttgatttttaatatttttttgtatttttgatttgtgggggatttatgggtagagcggttgtagaaattaggtcgtgagag

SEQ ID NO: 149 - DNA, 11913 bp, Artificial Sequence
  chemically treated genomic DNA (Homo sapiens)
taaagtagggtgttattaaagaaagaaggaagaaattggttaaacgaatttagaatataaataaaattattgtataaataaaatttttgtttacgattaagttggaatggcggttaaaaaagaaaagggaaaaaaaatttttagatgtaggtagatttttataattaagttattttttaaaggggaagtaaatgtgatagaatatttagtaagtaaatttattgaggaatattttgtttttatataattaaatttaatattgaggtaaaattgataattattaaattgagggtagttgggagagggaaaggggatgagataaaatttagtttataaaatattttattattttttataggttaaaaaatataaaagaaatatttggaaagaattgtttaagacggaaagattttaagattgtgtgattttttttttttttttttttttttttttttttttataggtgtagaataattttttttttttttttcgtggttttttttttttttattttttttttttgttgtttgtaaagttgaatttggggttaggagttttaattgtaattttagattggaattttagatggtgcgtttaggattggaagtaatttttagtttattaattttatgggtttacgtatttgttttggttacggtttggtttttatttttattgtggtattaatgtagaataaattgagatatattttttatataattagttttagaatttaaaaagatttacggtataataatagaggtagtgtcgcggaatttttttattgaggattttcggggagttcggggattatttcgcggtggtattagaatagacgagtaattttagcggttttaggtattgcgaattgggggagagggggaaattttgtatcgtattcggtagtatttaacggtttcgggtttttagatagggttagcgaggagagttaggatagtaagtggggattggttaaaaaaaatcgatttaattttgaaatgattagaagaagttgggagtagttattataaagttttttttttgtttttttttttttttaattgaaggaatgacgttgaaatttttatcgttagcgcggggttgggaattattttaaatatttgttttgtagtttcgagtgggtagatttcgaagagttggagtcggcggggaggggaggaatagttgttgggttgttttgcgcgtggggttcggggcgcgggtttcggggagaggcgttagtcgaaagtttgtttttttttcgcgataggtagtagcgaggtcgagttattttttattacggtttgcgggtttcgcgcgtagtgtggttgttttcgtttttgatcgatcgtagcgttttggggtgtttatttagttgttcgcggtcgttgggtgattttcggagggcggtttaggcgtgcgtattggtttttggggttgcggttgtagtagtttagtttcgcgttttgttagatgtagtggatagcgtcggggtgaaagtaagggttgagaaatttttattgttttgtttttatttagtttcgatttttttatattgtaataattatgtattttcgaggtcgggatgtttgcgttttgttagtgtattaacgttatatggttttttaggggttgttttcgtttttgtattttattagttttgaagaggtagaggggtggtgggtaaaatttttaattggacgttgagagattcgggttttagttcggcgttgttattaatttgttttttgtttttaaatagtagtagtaataaaaattgtaaagttgattgagttaaaggtttatattgtttttttatttaatttttagaataattttatgaggtgggcgttagtattttattatttcgtttgattagtaaggaaattgaggtttagagagattgcggaattcgtttagggttatatagttgttggttatttggtagagttgaggttttattttggggttattaattttttgttttttatcgttgcgttttatagattgtttttttttcggttgtttgggttttagtttttttttttgtaaaacgagaagtttaatttgtagttttttttgttaatcggtggtttagattaggaatttttgttatagatttcggcgttgataggggtaagaaggtgggtgaaagaagggggcgtttagttttttatagtttgtttttttttgggatttcgcgaagggcgggtttcgcgagttaaaggaggtataggagagcgtttatcgttcgcggcgggtgaaggtgttatttgttttcgtgttaggttgtgagttttggtgtttagtttagggcgttaaggttagtgtagttggtatgttttttttggaaaattttaggtttttcgtagagaacgttatttataataaagaagaggatagagaggtatggagcgttttgcgattgtaggagtacgttagttttttagcgttggtttagtgtcgtttgggttttcgggtatgtggattcgttggggtcgtacggagattttttgtcgggtttttggggtttttcgattgcggttttttagtttagtattttttttttggtttcgtaggttgtagggaattttttttatttttttagtcggagaagtttaagtcgggcgagggggtatttcggggttcgtatcggtgtttttttttttttcgtttttataaggattttgagaaaataaatggtagaggagagaggagttttatatttgtttggtttttttttttttttatttatttttatattttttatttcggggtaaaaatttatttttgaaaaatgttggtagagatttacgtgtttttgttttatttgggttttataaatataacgatttatatttaagttagtttttttttagataatttttttttttttcgttaaaagtgttaaggatggtaaaagaagaaataattttaattttttcgtttggaaatgaaagttttcggttttttataaagggtttttcgttttttatagttgagttttagttaagaaaaacgatttttaagtagaaataataggcggggagaaggaagggagatatagggatttggggggtttttagggtaattggtagtgaattttgtttcgagagttttttttttatttaaaaaattaaacgcgcgagtttcgcgaaaggtttagggatagatcgtgtgggagaggattgagtagagagcgtgggggtagtgttttgtagaatttttttttttttaataataattttaaaagtttttgagtggagacgacgtaaagttaagtagtaaaggtggtttgggaggtaagcggagggtttaagtgtcgtatttttatttttagggttttttgcgtttacgggatgcgtatttttaagaagtgcgtttttcgagtaagttttgggttcgtatatatttcgggttcgtagttagaatttaatggcgataacgtttatgtaatgtaagttaaaaattaaagcgtaaaaaattattatgttatttattgaaacgttattttttgttaaattgtaattattttgttttatataagtttggttggaaagtttgtagttttagttcgggttagttaggtataggaggtcggattgtaatcggttgtttttttttcgtcgcgtttggtcgttttacgttgcgtcgtcgttgttgttttttggcgtttttgggattttatacgtatttttgaaatacgtttcgtttcggttttcggtttttttttttgtttaggggttgttttttaatagatattgatttttttagaagatttaaaaattaaattaaaatattttttattcgttttaaatatttgttttggggcgcgggggttgttaaatagagattagacgaagggagttagatttagcgaagtttttcgagtttttaaagattcgaatattaattcgcgttcgtgggtcgatggaggttttttttattttattttttggtttttttaattggttttcgttttttggttaattattgagtaattagaatggtattttcgattagggttataggtagtgttcggcggagtggttttaggagttattcgttttttgtcgggtttcgtatttaaatttttttttttattttttttttttaaattgggcgttaggatgtttcggtcggaatatacgtaggttttgggcgtttgtttaagggttttttttttttttaaattagtcgttgttttttcggtttaatcgtagaagaattagatattttttattggaaagggaaattaagtgttgttgattttaattttaggtaggcggtaatcgtttttcgtttggcgtaaattttattaagtaaataattattagtcgatcgaaatacgttcggtttataattggtgtaattttcggttatttaattgagggacgttcgtttttagtttcgatttttggaatttataaagggttatttttttttttagtgattttaagattatggttatttttttattcgatagttttagaagtaagagttagatttaagggtgtaaagtaagggtatacgtttttttgaagtttgattgagttttttttgcgtttttttgaagttttcgtttttttggagtttatttgtttttttttttaaattatttttttagattaataattttatttttatttttatcgtattcgattttgttcggatttattgtttatttgaacggattttttagtgagacgaggtttttatattggcgaaggttaagaaggggaggtggggggagggttgtgttatatcggttagttgagagcgcgtgttgggttgaagaggagggtgttttcgagagggacgttttttcggattcgtttttattttagttgcgagggcgtttttaaggagtagcgcgcgttgtttggtcgggtttgggttgttgagtgaatggagcggtcgagttttttggttttttttttttttcgcgtcgtcggttttttttatttgagttttgggaagttgagggtagttaggtagttggggtaaggagtttaaggtagcgtttatattcgggggtttttcgtaattcgatcgtttgttcgtttttttatttttcgtttttttttttatttatttatttatttatttatttatttagagtcgggacggtagtttaggcgttcgggtttcgtcgttttttcgtcgcgattttggatttttttttgttgtaggattcggtttttacgtgtgtttcggagtcggcgttttagtatacgtttcgtttcgggtttgggtgtttatagtagttagagtagtagggagttcgggattcgggcggtatttgggttaagttaggcgtcgtcgaggttagcgttgaacgtttttagggtcggaggagtcgcggggcgttcgggtttgagtcgtagtaaatgggtttcgacgtgcgggatttgaacgcgttgttgttcgtcgttttttttttgggtggcggcggcggttgtgttttgtttgtgagcggcgcggcgtagtgggcgtcggtgttggattttgcgttttcgggcgtttcggtttacgggtcgttgggcggtttcgcgtcgttatcggtttcgtcgttattttcgtcgtcgtcgttttatttttttattaaataggagtcgagttggggcggcgcggagtcgtacgaggagtagtgtttgagcgtttttattgtttattttttcggttagtttattggtatagtcggagtttgtcgttacgggtttttcggttttttttcgtttagttaggcgttattcggttaggttaggatgttttttaacgcgttttatttgtttagttgtttcgagagttagttcgttattcgtaattagggtaagtaggtcggggagcgttttttacgcgcggggtagtggcgttagggatttttcgttttaggatattttttttttttattttttttgatcgtagtttttatttagttgttttttaagggtcgtgaggatagcggaagcggcggttggggaggaggtcggagagtgggagtgtacgtaggtattggttttcgatattttttaaagttaggtagagttaggagtttgattgttcgtaagagtcgggagggcgtttggggttttttagagttcgagagatttcgggattgttagtttttacgggagtggaattaggagatcggcgtagtgtttggttttgttttggggagagttttgttaattaaggaaacgttaaattgttattaagcgtagcgttttttagacgtttggattttggattcggagtgggattagcgcgggggtgagcgtttgtgttgtgttgttttcgtagcgttaaaatgtttaggagtatttttagtttttataatacggtgttggtatatatttaggtgtatattaagtatcgtagagaattagaatgagtatatgtatttttagtaattaaatggttttttggaatagcgtcgtgttcgtggatagttttcgcgtatggtaatatagaagtggatttttattgggtttcgtttaggcggcggttacgtaggttttggggatggaagagaatttgatttattcgagtttaagttatgcgggattaggttttatcgtaggtagtggaaggaggtacgagttttggttttttttttagcgtatttggggcgtttttttattttgtaaacgcggggtttagttgggatagtatttttttaagatttggggttagaataaggatagggttattcgttgtgtttagttaggatataaggagggaattcggtatacgataagtattaggttggttttttatttcgcgtcgatgttcgtttatttttttttcgtttgggcggcgcggattcgaatttgcggagtttttgtagtttgttttttttatttatttttagtggatttttacgttattgagaatttaagttagttcggtttgattcggtaatttagtaaacgttttattaatataatggcggatgttttttttggagtaaaattattcgagggtttagggatcgggatgtttttggaatgcgtgggaagtagagtgtattttttgtaggaggtattttcgtttaaggttcgggagaagggttttgtttttgttgttcgtttttattcgcgttttttaaacgcgcgtttttaggtcgtttttattttagtttaattaggagtattcggttttcgcgaagttttggagaaatcgaaatcgttttttttttcgggagaatttgggattattgttttgtggaggaatcgtaagtagatttaagggttgtttttattttatgtttttagttagtgaaattagtgttttgtatttaaggggcgttgggataatttattggtcgttgaggtttgtgttttttgattagatcgcgttatttttgtttagtaggttggtgttatttttggggagtttttaggttttagtgttttcgtttataagaggatagttgagatgggtaatttggagattgggttcggtttgaagttatattttatagatgtagaagcgttatttattatttttttggggttttaaatatggaattcggtaatttatttaaatatttgtgattgagaaataatgaattcgagagtattgtttgtatgtgtgttatttggaggcggttgagaaattatcgaatttatgtttttggggtataaaatattattacgttattatttttttagtatttttaggggatttttgaaatttgggttttgtcgtttcgtttgggttttttgtttagttttttttagggtaggtttggtgtttgggattttattatatgtcgtggggggtgggattgtgggttttgtagttagtaggtattatatttttggaaaatatttggatttttttgtaatatataggcgtggttgttatggagaaaaagttaaaaggggattaggattagtaggtgaatgtattttttttttttattttggagaaaaagtttaatggagagagggttttagatttaagttatatagtttggaagtattatttttaggtttaagttttgttttgtagtgaaaatagatgggtttattttatttagtttttgaggtttattgggtagtttggatgtgagaagcgtttcggttgttattttggagtgggtaagggtggttttcgagattttgggtttattttttggatttttagggtttttgttgtttttttaggaatgtagggtttggtttaagatttgggttgtgagaggtaagggtattaatttttaaaaatgtggaaatggttattagagcgttaaggttaaattttaggggagaggaattaaggtcgtttttggatttttagggtagtttagttatggtgtataggtaggggtaattgttggtatttatttataatcgtttaaaattttataagtatgtttatattttaaatttttaaatattatattttgtattttaattttgtaaatattaatttagtaaatattaatcgtttatttggttaggtattgggttttgaatattaattaagataatggtttcgagaatttttgtaagaagtttattagttaattttggagaggttttttgttttggatgaggaaatttaggttttatgagattaggtggtagaggtgggatttgaatttagattatgttagggtgtttttattttttttttagggattttggttttatcgttgagatggattttttttggtttgcgggaggggtattaaatttttagtttatgtgtgggggttgacgggtttgtgagggtagatgtggggtgaggatttgagtagttttagattagatgtaaggtttaaggaggaggggaaaaaagtttgtttgggtcggacgcggtggttcgaggcggttggattatttgaggttaggagtttgagattagtttggttaatacggtgaaattttgtttttattgaaaatataaaaaaaaaaattggtcgggtttggtgacgggcgtttataattttagttattcgggaggttgaggtataagaatcgtttgaattcgggaggttgaggttgaagtgagttgagatcgcgttattgtattgtagtttgggcgatagagcgaaatttcgtttcggaaaaaaaaaaaaaaaaaagaggttgtttgttagtttattgatttcgtagtttcgtaggttcgtagaattttaaggtatgattaggtttgggattattaggttattttagggttaggtgcggaggtttgcgacgttcgagggttaaaggttttttttttcggttatataggagagggtattttgttgggggataggttttttttaattatagtgtagttgtagttatcgtttttagttttttgagtatttttttggttgagtttgttgtttattttattttttagtttttacggttcggttaggttaggcggttttcggtttttttgtagtcgtcggcgggggaggagggtatagagcgcgtttcgttttttagcgtacggttaaggttgcgtttttttttcgggtcgggattaatcgtgggaaaggcgttattttggttattcgattttttttttttaaggtttgtataaggagtttttgaatacgttgttttttttagtcggtagttttattttttttggtttttgttttcgtatttttcgcgttaggttaagcgttgggtttagggatagcgcgttttaattaaattcgtgttcgataagtttttaattaaaagagattttttttcgtttcgtaggcgtttttattattgtttttttcggggggatttgaaggagagggtttgaggtcggtttttgttcgtcgaggtttgcgtgttcggtttgggaggaggtttaggagggttcgcgggttacgggtatttttgggttcgagttttggggtgcggacggacgtttcgagagtgggtgtcgcgattcgggatttacggttttcgtcgggtacggatagttgcggagtagggttttgaggattgtgtagtgttttgggtttttgtttatttttgggtttaggaatggagaagggttcgtttagagaaaattttttcgtagtttttatttcgtttttttttttttttttttttttttttttttttttttttttttttttttttttttttttgtgtttgtttttttttttttttttttttttttagtgtttttttagaaattcggtttttatttcgggtaatagtgggtgttttgagttaaatttcgtttgtaagtttatttataggttttaaagaaggttaggttttaggttttaaaaggaagtttgtggaagtttaaacgtgttcgtttatgtaggagagttaacggggtcgggggttatttttgtttatttagtaggagagaaatggaggttttcgaggttatatgataaaagttagtggttttttaaatttttagtgtgtggtgttgagtagtgtgtgagatttaagtttggatttgtattattcgggagttaggatttgtttttttttttttttttttgtattttgttatattattttttaggtttatgtttttgttgttttagagaagttttttttttttttttttttttttttttttttttgggcggggggtggtggtgtgtgtgtatgagcgttcgtgtgtgtttcgaaaatggaggtaacgatgttttgggttttgtttatcggttgagttttgtttaagtttttggaggtattttggttaaatagtgtaagagtgggagaatgggtgttgtttgatttaatttatttttgagaattttgtgaagtttggagatttagggtagttttgggttaggaggatttgaggttgttggggtggttttgttaggattttataggagtagttttttttagttattgtgtttggattttaggttatagatttcggaatttgtagaggaatgagattttatttttgggtttcggggttaatgacgtatttttagtcgaaggatttttttttttagaggtagtaatagttttttagaagtttgtggggtataagtttaaagtaatttaataataaaaattataaaagattatgttttttaattgaggttttacgtttttttttttattttgggggggggggggaatgttaggatttttttagggggaaattgaggtaaaggatcgaagtattattatggagggaaagggagatatagtgttaggtatattttaaaggaaattggttgtttagtttggggagtgaggaagttggtttttatagtagtggttagggtcggatttttgggcgtaaggtgggttttataggggggaggaggaggagagcgtagggtcgttatttgaaggtttaattggaaggggtttttgtttttttttttattagtttttttttgggtgttatggtgttaggtcgggtagttttagatagataatattattcggtaattattttttttatttttaagattaggttatttaattggtttcgagtaattaatgaaagttggtgcgcgggtttttgatttatagttcggagttaacgcggggttagtttagtagatttatttcgtttgttcgcgttgtttttgcggaagagttgtagtttatttttggggggtgaataattttttttgtcgattaggtaacgagttttatatttaatttgttaggggttcgttgtagaagcggtagagatcgtagaagattgcggtataaataaattgggaaaaagcgaggtgggggttttagttagaaaaggatggagaagtttgttttaaggttatatttagggatttgggtcgtttttttgtcgaaagttttggaggtttgtggggttggattttttttcgttgggggttcgaatgcggggtttagcgtatatttttttcgttcgtggttggtttagatttattgtttcgttttgcgagagtatcgttgatattgtgttttttttcgtcgttttcgtagg

SEQ ID NO: 150 - DNA, 11913 bp, Artificial Sequence
  chemically treated genomic DNA (Homo sapiens)
tttgcgggagcggcggagagaagtatagtgttagcggtgttttcgtaagacggggtagtgggtttgaattagttacgggcggggggggtgtgcgttgaatttcgtattcggatttttagcggaggagaatttagttttataagtttttaggattttcggtaggaagacggtttaagtttttggatgtgattttgggataggtttttttatttttttttgattaaaatttttatttcgtttttttttaatttatttatgtcgtagttttttacggtttttgtcgtttttgtagcgaatttttggtaaattaagtataaaattcgttgtttgatcgatagagaaggttgtttattttttaaaaataaattgtagttttttcgtaggagtagcgcgggtaagcgaaatgaatttgttgggttaatttcgcgttgatttcgagttgtaaattaggggttcgcgtattaatttttattaattattcggagttagttaaatggtttggttttaaaaatgggaagagtaattatcgagtaatgttatttgtttggggttattcgatttgatattatgatatttaagggaaagttggtgagggggaaaataagggttttttttagttgggtttttagatggcgattttgcgttttttttttttttttttttatgggatttattttgcgtttaggggttcgattttgattattgttgtaggagttaatttttttattttttaggttggataattaattttttttagagtgtgtttgatattgtatttttttttttttttatggtagtgtttcggttttttgttttagtttttttttagggaaattttagtatttttttttttttttaaagtgagaaaaagagcgtggagttttagttggaaaatatagttttttataatttttgttattaaattgttttaaatttatattttataagtttttggaaagttgttgttgtttttggggaaaaggatttttcggttaaagatacgttattggtttcggaatttaaggatggggttttatttttttataagtttcggagtttgtggtttgaagtttagatataatggttaaggagagttgtttttatgggattttggtagggttattttagtagttttagatttttttggtttaggattgttttgggtttttaaattttataaaatttttaggagtaaattgggttaaatagtatttatttttttatttttgtattatttgattaaagtgtttttaaagatttaagtaggatttagtcgatgagtaggatttagggtatcgttatttttattttcgaaatatatacggacgtttatgtatatatattattatttttcgtttagaaaaaaaaaaaaagaaaaagaaaaaaaaaaagtttttttggggtaatagaggtatgagtttggagggtggtgtggtagagtgtaagggagggaaggagggggtaaattttaattttcggatagtataggtttaggtttaagttttatatattgtttagtattatatattggggatttgagaagttattagtttttattatatgatttcgagggtttttattttttttttgttaagtgggtaaagataattttcggtttcgttagtttttttgtatgggcgagtacgtttgggtttttatagatttttttttgaaatttgaggtttggttttttttgaggtttatagatgagtttataaacgaaatttggtttagggtatttattattgttcggagtgaaggtcgaatttttgaaaggatattaaaaagagagagagagaaagagagatagatatagagagagagagagagagggagggagagagagagagagagagagagagagagagagagacgaaatagaagttacgaagaagttttttttagacgaatttttttttatttttgagtttaggagtaggtagggatttagggtattgtataatttttagagttttgtttcgtaattgttcgtgttcggcgagggtcgtgggtttcgagtcgcggtatttattttcgagacgttcgttcgtattttagaattcgggtttaaggatgttcgtggttcgcgagtttttttaggtttttttttagatcggatacgtagatttcggcgggtaaagatcggttttaaatttttttttttaggttttttcgggaggggtagtggtgaaagcgtttgcggagcggagggaggttttttttaattagaagtttatcggatacgggtttgattagagcgcgttgtttttgggtttagcgtttggtttggcgcggagagtgcgggggtaggggttaggggaggtaaagttgtcggttggaaggagtagcgtgtttaaaggttttttgtataggttttggagggagagaatcgagtggttaaggtagcgttttttttacggttagtttcggttcgggaggggagcgtaattttgatcgtgcgttaagaggcgagacgcgttttgtgtttttttttttcgtcggcggttgtagagaagtcgggaatcgtttggtttggtcgggtcgtgagagttgaggggtgaaatggatagtaggtttagttaggaaggtgtttagaaggttgaaaacgatgattgtagttgtattgtgattggggaaaatttgttttttaataaaatatttttttttgtgtgatcggaagagggagtttttggttttcgggcgtcgtaggttttcgtatttgattttagggtggtttgatgattttaggtttaattatgttttagggttttgcgagtttgcggggttgcgggattagtggattagtaggtaatttttttttttttttttttttttcgagacggagtttcgttttgtcgtttaggttgtagtgtagtggcgcgattttagtttattttaattttagtttttcgggtttaaacgatttttgtgttttagtttttcgagtagttgggattataggcgttcgttattaagttcggttaatttttttttttgtatttttagtagagatagggttttatcgtgttggttaggttggttttaaatttttgattttaggtgatttaatcgtttcgagttatcgcgttcggtttaagtaagtttttttttttttttttttaagttttgtatttagtttggggttatttaagtttttattttatatttgtttttataaattcgttaatttttatatatggattaagagtttggtgtttttttcgtaggttagaagaaatttattttaacggtggggttaagatttttggaaaaggagtagaaatattttagtatggtttgggtttaaattttatttttgttatttaattttatagaatttggatttttttatttaaaataaggggtttttttaggattagttggtgagttttttgtaaaggttttcgaggttattgttttaattaatatttagaatttagtgtttgattaagtaggcgattgatgtttgttaaattaatgtttataagattaggatgtaagatataatatttaagaatttaaaatatgaatatgtttgtgaagttttgggcggttgtgagtgggtattaataattgtttttgtttgtgtattatggttagattgttttagggatttagagacggttttgattttttttttttggggtttggttttggcgttttgatggttatttttatatttttgagagttgatgtttttgttttttatagtttaagttttgggttaggttttgtatttttggggaagtagtaggaattttggaaatttaaagaataaatttagaatttcgagggttatttttgtttattttaggatagtagtcggagcgttttttatatttaagttgtttaatgagttttaagggttgggtaagatggatttatttgtttttattgtaagataaaatttaaatttggagatggtgtttttaggttatatgatttgaatttagggttttttttttattgggttttttttttagggtggagaagaaggatatatttatttattagttttggtttttttttaattttttttttatggtagttacgtttgtatattatagaagaatttagatattttttagaagtgtaatgtttgttggttgtaaaatttatagttttattttttacgatatgtgataagattttaggtattagatttgttttgaaaagggttggataagggatttaaacgaagcgatagaatttaggttttaaaaattttttagaagtattaaaaagataatggcgtagtagtattttgtgttttaggggtatggattcgatggttttttaatcgtttttaaatagtatatatgtagatagtgttttcggatttattgttttttagttatagatgtttagatgggttgtcgagttttatatttaaagttttaagagggtggtgggtagcgtttttgtatttatggagtataattttaagtcggatttaatttttaggttgtttattttagttgtttttttatagacggggatattgagatttagaaattttttaaaagtaatattagtttgttaaataaaggtggcgcgatttgattaaagaatataagttttagcgattagtaagttgttttaacgttttttgagtataaaatattaattttattaattaaaagtatagagtggaggtaatttttgggtttgtttgcggtttttttataggatagtgattttagattttttcgaagaaaagggcggtttcgatttttttaaggtttcgcgggggtcgggtgtttttggttaggttaaggtaggagcggtttgaagacgcgcgtttagaaggcgcgggtgaaggcgggtaataagggtagagtttttttttcgagttttgggcgaaggtattttttgtaaaagatatattttgttttttacgtattttaaaaatatttcggtttttaggttttcgagtaattttgttttaggaaaagtattcgttattgtattagtaaagcgtttattaaattatcgaattaaatcgaattggtttaggtttttaatagcgtggaaatttattgaaaataaatgaagagggtaaattataggggtttcgtaggttcgggttcgcgtcgtttaggcgaaagagaggtgggcgggtatcggcgcgggatgagaaattaatttgatatttatcgtgtgtcgagttttttttttgtattttgattaagtatagcgaataattttgtttttgttttaattttaggttttgaagaaatattgttttagttgagtttcgcgtttataagatgaagaggcgttttagatgcgttgaaagaaaggttaaagttcgtgtttttttttattgtttgcggtagaatttggtttcgtatagtttggattcggataagttaagtttttttttatttttagaatttgcgtggtcgtcgtttgagcgaagtttagtgaagatttatttttgtattattatacgcgggagttatttacggatacgacgttgttttagaaagttatttagttattggaggtgtatgtgtttattttagttttttacgatatttaatgtgtatttaagtgtgtgttaatatcgtattataagggttggaggtgtttttggatattttagcgttgcggaggtagtatagtataggcgtttattttcgcgttggttttatttcgaatttagagtttagacgtttgaaaagcgttacgtttggtgataatttggcgtttttttaattaataaaattttttttaaggtagagttagatattgcgtcggttttttggttttattttcgtggggattagtagtttcggaatttttcggattttaaggggttttagacgttttttcggtttttgcgaatagttaggtttttagttttgtttggttttggaggatgtcgggggttagtgtttgcgtgtatttttatttttcggttttttttttagtcgtcgttttcgttatttttacggtttttgggaagtagttgggtaagagttgcggttaaaaggggtaggagaggggggtgttttagagcggagagtttttggcgttattgtttcgcgcgtagggggcgtttttcggtttatttattttgattgcgaatagcgggttggttttcgaggtagttgggtaggtagggcgcgttaggaaatattttggtttggtcggatgacgtttggttgggcggaggaggatcgaagggttcgtagcgataggtttcggttgtgttagtgaattggtcggaaaagtggatagtgaaggcgtttaggtattgtttttcgtgcggtttcgcgtcgttttagttcggtttttgtttgatgaaggagtgaggcggcggcggcgggggtggcggcggagtcggtggcggcgcggggtcgtttaacgattcgtaagtcgaagcgttcgggggcgtaaagtttagtatcggcgtttattgcgtcgcgtcgtttataggtagggtatagtcgtcgtcgttatttagggaggggacggcgggtagtagcgcgtttaggtttcgtacgtcggagtttatttgttgcggtttagattcggacgtttcgcggttttttcggttttggagacgtttagcgttggtttcggcggcgtttaatttggtttagatgtcgttcgggtttcggattttttgttgttttggttgttgtaggtatttaggttcggagcggagcgtgtgttgagacgtcggtttcgggatatacgtggaagtcgggttttgtagtaagaggaagtttaggatcgcggcgaggagacggcggggttcgggcgtttgggttgtcgtttcggttttgggtgggtgggtgggtgaatgagtaggtgggagggagggcgggaagtgggggagcggataggcggtcgggttgcggagagttttcgggtgtgggcgttgttttgaattttttattttagttgtttggttgtttttagttttttaaagtttaaataagaggggtcggcggcgcggggaagaggaggagttaggaggttcggtcgttttatttatttagtagtttaagttcggttaggtagcgcgcgttgttttttgggggcgttttcgtagttggggtgagggcgggttcgagggagcgtttttttcggagatatttttttttttaatttaatacgcgtttttagttggtcggtgtggtataattttttttttattttttttttttggttttcgttagtgtgggagtttcgttttattggagagttcgtttaggtaagtagtgagttcgggtagggtcgaatgcggtgggagtagagatggggttgttaatttaaaagagtggtttggagggaggggtaggtaggttttaagagggcgggaattttaggaaagcgtagaaagaatttagttaagttttaaagaagcgtatatttttgttttgtatttttgagtttggtttttgtttttagaattgtcgggtaggggagtggttatgattttggggttattggggaaagaggtggttttttgtgggttttagaggtcgggattgaaagcgaacgttttttagttgggtggtcgggagttgtattagttataagtcgggcgtatttcgatcggttagtagttgtttatttggtgaggtttgcgttaggcggaaggcggttgtcgtttatttaaaattggagttagtagtatttagtttttttttttagtgaggaatatttaatttttttacggttaagtcgggaaaatagcggttagtttaggagggaagaaaatttttgggtaaacgtttaaagtttgcgtatatttcggtcggagtattttggcgtttagtttggggaggaggggtgaaggggagggtttggatacgaagttcggtagggagcgggtaatttttggagttatttcgtcgagtattgtttgtggttttggtcgaggatattattttggttgtttagtgattgattaggaggcggaagttagttaaggggattaaggagtggagtagggagaatttttatcggtttacgggcgcgagttagtgttcgaatttttgggagttcgaagagtttcgttaaatttgatttttttcgtttagtttttgtttggtagttttcgcgttttagagtaggtgtttggggcgggtagggggtgttttggtttggtttttggattttttaaaggagttagtatttattgggaaataatttttaggtaaggagaagaatcgggggtcggagcggagcgtgttttagaggtgcgtataaaattttaggggcgttaggaggtagtagcgacggcgtagcgtgggacggttaggcgcgacgggagggaagtaatcggttgtagttcggttttttgtatttggttggttcgggttggggttgtaagttttttagttaaatttatgtgaagtaaagtagttgtagtttgataaagaatggcgttttaataaatgatatagtaattttttacgttttggtttttagtttgtattgtataaacgttgtcgttattaaattttggttgcggattcgaagtgtgtgcgggtttaggatttattcgaagggcgtattttttgggaatgcgtatttcgtaggcgtaggagattttgagggtaaagatgcggtatttgagtttttcgtttgttttttaggttatttttgttgtttgattttgcgtcgtttttatttagaagtttttaaaattattattaagaaaagaaagattttataagatattgtttttacgttttttgtttagtttttttttatacgatttatttttaaatttttcgcggggttcgcgcgtttggttttttgagtggagaaaggattttcgagataaaatttattgttagttgttttaagaattttttagatttttgtatttttttttttttttttcgtttattatttttatttggaagtcgttttttttaattaggatttaattgtgaggggcgaggagttttttatgaaaagtcggggatttttatttttaaacgaaaagattgagattgtttttttttttattatttttggtatttttagcggggggagaggaggttatttgaagggaggttggtttgaatgtgagtcgttgtgtttgtgaaatttaggtaaggtaaagatacgtaaatttttgttaatattttttaaaaataagtttttgtttcggggtgagggatgtaggggtggataggaggaaaggagagttaagtaaatgtagaattttttttttttttgttatttatttttttagaatttttgtgggggcggggaggggaagagtatcggtgcgaatttcggggtgttttttcgttcgatttggattttttcgattaaagaggtgggaggagttttttgtagtttgcggggttaagaagaaagtgttaagttgaggagtcgtagtcggaggattttagggattcgataggaagttttcgtacgattttaacggatttatatgttcggaagtttaggcgatattaagttagcgttggggaattgacgtatttttgtagtcgtagggcgttttatgtttttttgtttttttttttgttgtgggtaacgttttttgcgggagatttgaggttttttaagggggatatgttagttatattggttttggcgttttgagttaagtattaggatttatagtttagtacgaaggtaggtagtatttttattcgtcgcggacgataggcgtttttttgtattttttttagttcgcgaggttcgtttttcgcgaggttttagagaaaagtaggttgtggaaaattgggcgttttttttttttatttatttttttatttttgttagcgtcgagatttgtagtagaggtttttggtttgaattatcgattggtaaagaaagttgtagattaaatttttcgttttatagagaaggaaattgaggtttagatagtcgaaggagaggtagtttatggagcgtagcggtaaagagtaaggggttggtggttttagaatggaattttagttttgttaggtaattaatagttgtgtgattttagacgagtttcgtagtttttttgagttttagtttttttattggttaaacgggataatgggatattagcgtttattttatagagttgttttgaggattagataggagagtagtgtgggtttttgatttaattaattttatagtttttgttattattattgtttaaggataggaaataagttagtggtaacgtcgagttgaaattcgggttttttaacgtttagttggaggttttatttattatttttttatttttttagagttaatgggatgtagaggcgaggatagtttttggaaaattatgtggcgttgatatattggtaaagcgtaggtatttcggtttcgaaggtgtataattattgtaatatgaaaaaatcgaggttgggtaggagtagggtagtgaggattttttaatttttatttttatttcggcgttgtttattgtatttgatagagcgcggagttgggttgttatagtcgtaattttagggattagtgcgtacgtttgggtcgtttttcgggagttatttagcggtcgcggataattgaataaatattttaaagcgttgcggtcggttaagggcggggatagttatattgcgcgcggggttcgtaggtcgtaataaagagtggttcgatttcgttgttgtttgtcgcgggagaggaataagttttcgattagcgttttttttcggggttcgcgtttcgagttttacgcgtaagatagtttaatagttgtttttttttttttcgtcgattttaatttttcggaatttgtttattcggggttgtagggtaagtgtttaggatggtttttagtttcgcgttggcggtgaaaattttaacgttatttttttaattaaaaaaaggggggggtaagggaggggttttgtgataattatttttagttttttttgattattttaaaattaagtcgattttttttaattagtttttatttattgttttaatttttttcgttgattttatttgggagttcggaatcgttaggtattgtcgaatgcggtgtaaaattttttttttttttttagttcgtagtgtttggagtcgttggggttattcgtttgttttgatgttatcgcgagatggttttcgagtttttcgagagtttttagtgaaaggatttcgcggtattgtttttattattatatcgtaaatttttttaaattttggaattaattatatagaggatatgttttaatttgttttgtattaatgttatagtggggatggaggttaggtcgtggttagagtagatacgtaggtttatgaaattgatgaattgagagttgtttttagttttgagcgtattatttggaattttagtttgaggttataattagaatttttgattttagatttaattttgtaaataataggggaaaaaaatggggaaaagaaaaattacgagagagggaaaaaaaattattttgtatttgtaaaaaaaaaaaaaaaaaaaaaaaaaaaaaaaaagttatataattttaaaattttttcgttttagataattttttttaagtattttttttgtgttttttaatttataaaagataatggaatgttttatagattggattttattttatttttttttttttttttaattgtttttagtttaatagttgttagttttattttagtgttgaatttaattatataggaataaaatattttttagtaaatttgtttgttaaatattttgttatatttattttttttttgagaaatggtttaattatagaaatttatttgtatttaggaattttttttttttttttttttttgatcgttattttagtttaatcgtaagtagagattttatttgtgtagtaattttatttgtgttttaaattcgtttagttaattttttttttttttttttagtaatattttgtttta

SEQ ID NO: 151 - DNA, 4316 bp, Artificial Sequence
  chemically treated genomic DNA (Homo sapiens)
ttgtagttaataaaaaaaaaaaaagaaagaaagaaattggtttttgttttattttatatgtttaggtataatttttttagagaagaagaggaggggggcggggaggagtaggaggaggaggaaagaaggaggagaaggagaaggagaagaagaggaagaggaagaggaagaagaagaagaagaagaagaggaagaggaagaggaagaagaagaagaagaagaagaagaagaagaagaagaagaagaagaagaagaagaagaagaagaagaggaagaagaggaagaagaagaaattgtttttagatttttatttttaggataagtttattgtttggtattaagttttttggggtgaatttttttttaaaagagttcggggagtttaggtatggaatgggaggtagaaagtttaattaagggattgggatttcggaatgaataatgaagggagatggattgggtttatgtcgaaggtttttttttggttttttagttttcgggcgaagatttagggagatattgagatatattttgtataggagggggagggggagggggagggtaaagttttagggttttaggagtggtttttaagggtttaggtttcgaggcggtgtttggggttggaaggtttagtattgagaattttttatttttttagagttttttttttttttttaattcgtgttaggttttttattttggatatttataacgcggttttattttttatttttattgggcgtcgcgtttttagagaagttaattagtgtcgtcgtagtttttaggttttaaagttttacgtatttcgcgggatttatattttttttagacgcggaggttggggttatggcgtttcgaagtttttttttgttgtttttaggggttttggttttgatcgatatttgggcgggtgagtgcggggtttagagagaaacggtttttgtggggaggagtgaggggttcgttcggtgggggcgtaggatttagggagtcgcgttcggaggagggtttggcgggttttatttttttttcgtttttaggtttttattttttgaggtattttagtatcgttgtgtcgcggttcggtcgcggggagtttcgttatatcgtcgtggagtacgtagacgatacgtaatttttgcggttcgatagcgacgtcgcgatttcgaggatggagtcgcgggagtcgtgggtggagtaagaggggtcgtagtattgggagtggattatagggtacgttaaggttaacgtatagattgatcgagtggttttgaggaatttgtttcgtcgttataattagagcgaggttggtgagtgaattcggtcgggggcgtaggttacgattattttttattcgttacggatcgttcgggttttttcgagttttcggattcgaaatttatttcgaggtagcggattcgtttagattttttattcgggagagttttaggcgtttttatcgaggtttatttttagtttaggttaaaattttcgcgggttgggcggggagggggcggggttagttgggcggggttgattgcggggatcggttagggttttatattttttagggaatgaatggttgcgatatggggttcgacggacgtttttttcgcgggtattattagtacgcgtacgacggtaaggattatatttttttgaacgaggatttgcgtttttggatcgcggcggatatcgtggtttagattatttagcgtttttatgaggtagaggaatatgtagaggagtttaggatttatttggagggcgagtgtttggagttgtttcgtagatatttggagaatgggaaggagacgttatagcgcgtaggtattaggggttatgggcgttttttttattttttgtagattttttgggatggtttcgtataaggttgggaggaaagtgggtttaatgttaggatatcgttttttttttagttttgagtaggaagaatttttttggttttcgagattcggtattagagagtgattgtgagagttcgttttgttttttgggataattaagggatgaaatttttgagggaatggagggaagatagtttttggaatatcgattcgcggttttttttgagttttttaatagttttgggtttcgtgattttttttttaagttttgttttttgttttatatttaatgtgtttggggttttgattttagtttttcggtttttatttaggttagggttagaagtttttgttttttatttagagattcgaattttttaaggaataggagatttttttaggtgtttgtgtttaggttggtgtttgggttttgtgtttttttttttattttaggtgttttgtttatttttaggttggttatatgggtgttgttggggttttttatgaggagtgtaaagtgtttgaattttttgattttttttagattttttaaaggtatacgttgtttattattttatttttgattatgaggttattttgaggtgttgggttttgggtttttattttgcggagattacgttgatttggtagcgggatggggaggaatagatttaggatatagagtttgtggagattaggtttgtaggggatggaattttttagaagtgggtcgttgtggtggtgttttttggagaggaatagagatatatatgttatgtgtagtacgaggggttgttttagttttttattttgagatggggtaaggagggagatgggtaaagaggggaacgaggggttatgtttttttttagggaaagtaggagtttttttggagttttttagtagggttagggttgaggtttggagattagggttttttatttttttttttttttttagagtagtttttttagtttattatttttatcgtgggtatcgttgttggttttgttgtttttggagttgtggttattggagttgtggtcgttgttgtgatgtggaggaagaagagtttaggtaggaaggggtgaggagtggagtttgagtttttttgttttattgggggttgtaagttttaagtagaagtgtgttttgttttattattgggaagtattatttatatttatgggtttatttagtttgggttttgtgtgttagtatttatttatttgtaaagtttttgtgaaaatgaaggatagattttttatttcgatgattatggtggtgatgggatttgattttagtagttataaattataggggaaggtttttgttgatgatagattttaggagggtagttggtttaggatttatatttgttttttttatattttttgattttgttttggatttatagttatatttttttggaaatttttttgggattaaagattaggggtttgttttaggattttatggttttgttttttttttggttttttataggatattttttttttatagatagaaatagagggagttatttttaggttgtaggtaagatgaaggaggttgatttttgagattgttgggatattgtggttaggagtttatgagggagtttatttattttatagtttttttagttatatttgtgggttttgattaggttttgtttttgttttattttaattattgatagtgtttagggttttggggtgttttttatagttaataaaggtgatattttagggtaggggttttgatgtgagtggggtgttgggggggaatagaggggatttagttgtgttattgggtttttttgatttggatgttttgagtatgaaatgggttatttagagtgttattttttattgtgattgatacgaatttgtttatgaatattttttttatagtgtgagatagtttttttgtgtgggattgagaagtaagatattaatgtagtagaattgtatttgtgttttacgaatatatataaattttaaaaataaagaataaaaatatatttttttatagatataggtagatatgtttttatagtatgtacgtaaatgtgtgtgtgtgtgtgtgtgtgtgaagagaaagagtgaatagagagattaagatttttttaatggtgaaaagatatatatatatttggaattagttagtttgatttagtttaggtgattttaattttggtggtaataattaaagtatcgtagttaggagttagtcgaatatatgtttttttttttttattagattgaattagagtgttgattttggttatattaatgttataaatttttttatagtttgtttgatttggtgtttgttggttttaatatttatagtgaatataagtaggttgttgttttttattttttttatagtttatttagtggttagcggaaatttgatgataatatggtggttaagttt

SEQ ID NO: 152 - DNA, 4316 bp, Artificial Sequence
  chemically treated genomic DNA (Homo sapiens)
aagtttgattattatgttattattaagttttcgttgattattgagtaggttgtgaagaagatagaaaataatagtttatttgtgtttattgtggatgttaaagttaataagtattagattaaataggttgtgaagaagtttgtgatattgatgtggttaaagttaatattttgatttagtttgatggagagaggaaggtatatgttcgattggtttttgattacgatgttttggttgttgttattaaaattgggattatttaaattgagttaagttggttaattttaaatatatgtatatttttttattattaaaagaattttaatttttttatttattttttttttttatatatatatatatatatatatatttacgtgtatgttataaaaatatatttatttgtatttataaaaagatatatttttattttttatttttaaaatttatgtatgttcgtgaggtataagtgtaattttgttatattgatattttgttttttagttttatataaggaagttgttttatattatagagaaaatatttatgaataaattcgtattagttatagtgagaggtaatattttaaatagtttattttatgtttaagatatttaagttaaagaaatttaatagtatagttgagttttttttgtttttttttaatattttatttatattagggtttttgttttggagtgttatttttattagttgtgagagatattttagagttttgggtattgttagtgattggggtagaataaaaataggatttggttagagtttatagatgtggttagaggaattgtggggtgggtgagtttttttataggtttttgattataatattttaataattttagggattagttttttttattttatttgtagtttgagagtagttttttttgtttttatttatgggaagaaaatgttttgtgagaggttagaaaggaggtagggttataaggttttagagtaaatttttagtttttgattttagagaagtttttagaaaagtgtaattgtagatttagggtaggattaagaaatatgaagaaagtagatgtgggttttggattaattgtttttttgaggtttgttattagtagggatttttttttgtgatttgtgattgttgggattaggttttattattattataattatcgaagtgaagaatttgttttttatttttataggagttttataaatgagtaggtgttggtatatagggtttaggttgggtagatttatgagtgtggatggtgttttttagtaatgaggtagggtatatttttatttggggtttgtaatttttagtgggataagaaaatttagattttattttttatttttttttatttgagtttttttttttttatattatagtagcgattatagttttagtgattatagttttaaggataataaggttagtaacgatgtttacgatggggatggtgggttggggagattgttttgggaaaggaagggaaggtgaggggttttgatttttaggttttagttttgattttgttgaagagttttagaagggtttttgttttttttgagaaaagatatgatttttcgtttttttttttatttatttttttttttattttattttaggatgaggggttggggtagtttttcgtgttgtatatggtatgtgtatttttgtttttttttagaaggtattattatagcggtttatttttggaaggttttattttttgtaggtttggtttttataagttttgtgttttgggtttgtttttttttatttcgttgttaggttagcgtgattttcgtagggtagaagtttagggtttagtattttagggtggttttatggttagagatggggtggtgggtaacgtgtgtttttggaggatttgagaagagttagaaaatttaggtattttgtattttttatgggaaattttagtagtatttatgtgattaatttgagaatggataggatatttggggtggggaagggagtatagaatttagatattagtttggatatagatatttgggaaaattttttattttttggaaagttcgagtttttgagtggggagtagggatttttggttttgatttaagtggaggtcgagggattggaattagagttttaaatatattgagtgtgaggtagagaataaaatttgagagaaaagttacggggtttaaggttgttggagggtttaaaggggatcgcggatcggtattttagggattgttttttttttatttttttagagattttattttttaattgttttagagagtagggcggatttttatagttattttttggtatcggatttcgaaagttaggaagattttttttatttaggattagagggagggcgatattttagtattgggtttattttttttttaattttgtgcgaggttattttaagagatttataggagatagggaaggcgtttatggtttttggtatttgcgcgttgtagcgttttttttttattttttaagtatttgcggagtaattttaggtattcgttttttaggtaggttttgaatttttttgtatatttttttgttttatagaagcgttgggtgatttgagttacggtgttcgtcgcggtttaggagcgtaggttttcgtttagggagatgtaatttttgtcgtcgtacgcgtgttggtgatattcgcggaggaggcgttcgtcgggttttatgtcgtagttatttattttttggagggtgtgagattttagtcggttttcgtagttagtttcgtttagttagtttcgtttttttttcgtttaattcgcggggattttggtttaaattgaaaatgaatttcggtaaaggcgtttgggattttttcgggtggagggtttgggcgggttcgttgtttcggggtagatttcggattcggagattcggggggattcgggcggttcgtggcggatggggggtggtcgtgatttgcgttttcggtcgggtttatttattagtttcgttttggttgtagcggcggagtaggttttttagggttattcggttagtttgtgcgttggttttggcgtattttgtggtttatttttaatattgcggttttttttgttttatttacggttttcgcggttttattttcggaatcgcggcgtcgttgtcgaatcgtaggaattgcgtgtcgtttacgtattttacggcgatgtagcggggtttttcgcggtcgggtcgcgatatagcggtgttgaaatattttaaggagtgggagtttgggggcgaggagggggtgagattcgttagattttttttcgggcgcggttttttgagttttgcgtttttatcgggcgggttttttatttttttttatagaggtcgtttttttttggatttcgtatttattcgtttaagtatcggttagggttagggtttttgagagtagtaggaggaggtttcggggcgttatgattttaattttcgcgtttgggaaaaatatgagtttcgcggggtgcgtgggattttagaatttgggaattgcggcgatattgattggtttttttagaaacgcgacgtttaatgggagtgagaaatggggtcgcgttatgagtatttaggatgaaggatttgatacgggttgggagagaaagagaaattttggggagatggggaatttttaatattgagttttttaattttagatatcgtttcggggtttgagtttttgagagttatttttggggttttgggattttgtttttttttttttttttttttttttgtgtagggtgtgttttaatgtttttttgagttttcgttcgggggttgagaaattagggagaaattttcggtatggatttagtttatttttttttattatttatttcgaaattttagttttttgattgaattttttgttttttattttatatttggatttttcggatttttttggaagaaaatttattttaaggagtttggtgttagataatgaatttgttttgagaatgaaggtttagagatagttttttttttttttttttttttttttttttttttttttttttttttttttttttttttttttttttttttttttttttttttttttttttttttttttttttttttttttttttttttttttttttttttttttttttttttttttttttttttttttttttttttttttttttttttttttttgttttttttcgttttttttttttttttttttggaaaagttgtatttgagtatatgaaataggatagagattagtttttttttttttttttttttttttattagttgtag

SEQ ID NO: 153 - DNA, 14147 bp, Artificial Sequence
  chemically treated genomic DNA (Homo sapiens)
gggggtattgagtaatatatttagattaataatattttataagtgtgagtattattgatttaaatttttttgttggttgtgttttgtgtttatgtttgttttatatttattttttttagagttgttttttttagagttttagtaatttttatttttttaaatttttttagttatgggaaggattagtaggtgttagtggatttaaaagaattttagatttgttgagatttttgatttttggtgtttagattaattagtaaatagtttaattaaacggtttgtttttatggttaatataattttgaattggtggttatttagattaagtttattttgtttttgagacggaattttgtttttgtcgtttaggttggagtgtagtggtgcgattttggtttattgtaatttttgttttttgggtttaagggatttttttgttttagttttttaagtagttgggattataggtatttattattattttcgattaatttttgtatttttagtagagatagggttttgttatgttggttaggttggttttaaatttcgattttagatgatttgtttattttagtttttttaagtgttgggattgtaggtgtgagttatcgcgtttagttaaagtttagtttgtataagaaggttttttttgttatgttataggatttttgagtttattaaatagattttaatgttttgagattttacgtatttttttaaaatgaagtatttaaattgttagtgtttgtttttttgtttggtttttttgatgtattgatttggtttgttagtgtgatgaaaaatatggttgagttttattgttttattgtaattagtaggattgtttagaagtttaatttttttaagagatgaagatttgagtttatgtagttggttgttttttaaaaatatttggttatttgggatatattttgaattaattttttggttattttatgtgattaaaagtgttagttttttttgtttttagtatatttttttgtttgggaagtggaagggatgaaatttttatatttttttttgatgatatagaaaggagtatatatttatattttatgaatagatatgtaattatagaagaaatagtttaacggtcgggcgcggtggtttatatttgtaattttagtattttgggaggtcgaggtgggtggattacgaggttaggagtttaagattagtttgtttaagatagtgaaatttcgtttttattaaaaatataaaaaattagtcgggaacggtggtaggcgtttgtaattttagttatttaggaggttgaggtaggagaatcgtttgaattcggagggtggaggttgtagtgagtcgagattacgttattgtattttagtttgggcgatatagtgagattttattttaaaaaaaaaaaaaaaagtataattatatgattatttatattgttttatatattaaattagtagtaatttgttttttatatagtaaataaaaataaattagtagtaataaatatattttttttgtgttatagttagtatttggtgaattttgtattttttttttttttaaagtgttgaatttataggtttttataaggtaagtttatattattaattaattttgtttttttttttgatgttaaaattgttttttaggagttgattaggtttatttttttgttttttaagtattatttttagaatatttttgaaagtatttttgttttttggtaataatatttatattttatttattttttgtttttaaatatatatttagttaattttaggttttttttaatggagtagttatttatttatttaatatacgttgggtgttttttttgtgttatatattgttttggtttttggggatagagtaggaaataaaaaaaaataaaatttgtttttatatagttgatattttagttaggggagataaataataaataaatgaatgatgtagtatgttagatgttgatagtgttatggagaaagtatattatggagattagaagtattatttgtaatggaatagttatgattttaagaagaatggttgattggatgtgaagtgtgagagagaggagtttaggtttttggttgagtaattggagggatggagttgttattatttgagatggagaagttaggggaggagtagatttggaggggaaggttaggaatttagtttggaatttgttaagtatgaggtatttattaaatattgaagtggatttttagaagatgttattaaaattagttaagtttaggagagagttttgggttagaaataaaaatgtgggagatattggtatatatatgggtttatattatttttttttttaatttaatattttattttattgttttttgtttttttaatagtatttagttttatttattttttaaattgatttttatattgatagtataataaaatttatattttttattatattaagattttgtgtgatttaatttttttttattttttggattttgttttaggttattttttttttttatttaatttttaatattttgattttattgttttttaaatagttttttgttgttttttgttttttttgtggaaaaggtttttttattgtttaattattaggtatttttcgatttttttttattttttatttttgagaaaggttttttttgattttttatattaattaggatttttttgggcgagatttgatttaaattggtttagagaaaaggagttaattgattggtttatgtaatttaattttttttttttgttgtaatttttttttggtttttattttatttaaggttaaagttagggtttttattatggttttgtaggttttatatagtttgttttttttattatttttttgattttattttttatattttttttttatttatttttttttagttagagtggtttttttgttgtattttaaatatgttaggtatatttttattttagtgtttttgtgtttgttgttttttgtgtgtggaatatattttttatatagttatattatttaaaatttattgtttttaagtttttatttaaatgttttttcgtgaagttatttttgagttttttttaaaattgtagttttttatttttgtattttttattgttttttatttttaatttttgttattgtagttagaattatttgatatatagtttttattttattggttttttgttatgtttttttttataagaatttgaagtttattaggtcgggagttttgtttgttgtgtttgttgttattttttagtgtttaaaattgtttggtatatagtaggtatttaataatttttgaattagtgaaaattagatggtggtttggtatttttatataggaatgagttaggtggaaattatttaggatataagtagattttgaagtgataaggaagggttattataattatgtggggtttattttgtttttttttgttttttttttttaggtttagtaatagttttattaaggattttatgaatattaaagtttatatttatatgttgttagaggtgagagtagtttattttattattagattttgtgtttagggtggtgatttgaagaaggaagagagcgaaagaagggaaggattatttttttttttaaattggagttaagggagggaggttagagtaagtttgggggcgtaatttagatttagtttttgtttaattttttttgtttttttttttaggggtttagagaattataaggtttgtagaattttttagagaagttttattattgattttttttttttatttttagatattaaagagtttgaatgtttttgagttatatggtttttttttttttttataaattttgttagttgttacgggggtttgtttttagggtataaagttattgagagatttagagatttagtttttttgtggaatttttaaaatgttttagtagttttgtttttagtttgttgtttggtagtatttgttagttgattttatgtattgtttttttttttgttattttggtaatttgggttttttattttatttttttttttatttttttttttagacgttattttttgaattgttatagagaatgggttaatttatggtggaggtttgtttatttttataataattaaagggttttaaggtttacgtttttatatatttaattattttttaggtattttaaattatatttaaattttaatttagttttattttgttttagtttttgtttgtaagtgttttagtttttaatgggtatagatttggatttcgttttttttagtcgggtttttattttaggttgagtttagttatcgttaattaatgtagagttaggttttttttttttttaattttggtcgtagtttaattttgttttttgaaagtatttcgtttttgttatttaatgttttttcgtgtgtttgatagttattttgtttttttattttcgttgtgttttaaattcgtttttatttagttttatggttttgtttaatcgtagagttgttttgttcgtttacgcggagtttagttcgatttattttcgtcggttgttacgtttatttttatataagttttgttttcgttgagtagtatggcgtgcgatatcgtttttttggtgttttggtaggggtttagaagtttttcgttcgttaattagagaaaaatagggttatttattttcgtttttgggggttgttttttattaattttatgtaagttaattagtgtgaggtagattttcgttttttcgatataggtttcgagtttttttagttgtttatagttcgttagtttttgagttaatcggcgtggagtatcgtgaaggtcgaacgcgttttttcgggattttaggggtcgtgagcgttttattatttttttttacgttaattacggtatagttttgtagggaagggttcgttttttaatttttcgaggttttgcggtcgattaatagcgttttggttaattagcgagcggcgggatattgggtttttttttttcgggtttacgtgagttgtagggaaacgtaggggcggtttttaggtgttgtcgtcgttatcgttattattatttttatcgtcgtttcggaatttaggtttggggggcggtggggtcgcgtatggagttttcgtttttcggagttgttaatattgttaacgttatcgttacgttatatataggtgagttttgggtttggagggtggagggtttagttcgtgattttacgtatttttttcgttttcgcgtagaggatgtggtttggtcggtggtttgttggtgttcgatttttcgtcgttattattacggttggtggatttgcgtgtggtattgtttaagtttttcgttttttatagtggatttgatcgtggtttaatttttttttttcgttgtataatggatcggtttgcgtgtttatgtttttttttacgttaatttagggtggattcgtttataggttttttttttatttttatttttattcgttttttatttatttttatttatagggagttagtttgtgatagtgtttagtttttttaatagtaggtgtatttgagtgtttggattttttttagttttaatttttaggagattcgttcgtggttttatttattttattttttttgtatatcgtagcgaattaattcgtggcgtcgtattttttcgtatttttttttaatagtgagtttatttgagtttgtatttttgttttttttagttttttaatgtattagtttatggttttttttaaaattattttttttttttattattattattattattttatagtggattagtttttatgtttggatttacgtttttttagttattagtttattgttttgttttttttttttcgtagattgtcgttttagcgtttggggtttttttttttttaatagtgggttagtttagtgttttatatttttttatttttagtagtttagtttatagttttttttttttttgttttgaattagtttgtgtgatggtttttttttttttttattgtggtgtaggagtttgtaaggttttttgttttttttttttttagacgatgagttttattatttttttttttgtagtggatttgtttattggttttttttttttatatttttgtatgtttgtatagtttttcgtatattttttcgtgagtttagtgttttgtaattgggggaagatcggtcgtgtatttttaatttttttttttttttttttttttttttagaagagaacgtgttgatttttttttttttgtgatggagtattgtacggttttttttgttttttattttttaatagtgggttagtttggttatattcgtaattataaagacgttttgttttattataataagtgaatatattagcgttagtgatgatagtaatgttaataggagttagcgtttattgagtatttgtcgtatattaggtagagtgttttatatgaatgagtttttttaatttttattataattttatgagataggtagtgagggaattgggttatagggaggttaaattttttatttaaaggtggtttaggaagtatttaggatataggataatttttgaggttttttttttagattttattttattttacgtgaggttttagtttttaaaaattaaattagtttttatttttaagtttttgtttttgttgttttttttgtttgtagagtagtttttattttttatttttttttagtatttatttattttttaattttagtagttgtgtgattttagatgagtgatttaattattttttttttgtgtttttttttttatttgtgaaatgggggattagaattagaattttttttagtgtaaataaatattaattgtgaattaatggtaaaataagtaatttttttagtattatcgtttatatttttttatttttttattgtgttttaattatattggttttattatatagttttttaaatatagtaggtatgggttagttttagggtttttgtattggttgttttttgtgttttgaatattatttttagatttttgtatggttttttttagtattttgtttaaatattaatttttaaaggatgtttattatattgtggtgtgtggaatgtagtataaaaagatatatgtatgaaagatgtttttaagaatgttagtttatatatgagtaagggttttttttttttttaaaaggatgtgtttataagattgaggtacgtaatatgttttgtaaaggtataggtataaaagttgtttttaagagtgttagttgtatatgtgaataaggattgtgttgttgtattgaaagaatgtgtttataaaattgtggtgtgtagttgggtataggggtgtgtatttatagttttagttattcgggaggttgaggtgggaggatagtttgagtttaggagttttaggttagtttgggtaatatagcgagatttttttttttgaaaaaaaaaaatttaaaaaataattattgtggtgtgtgtaatatatttttttaaaggtataggcgtaaaagatgtttttaagagtgatttgattttgttgtatttgggtagtgttattttattaaaggttgattgttatattatggtatttagaatatattatataaaggtatatgtataaaaaagaagtttttaataatgttatttgtaaaaataaaaaaagttaatttttttttgattatttgaagttgtatatttagtagggtttaagttaggtttttgatttgtttcgttgttttttattattgtttgatatattgtgtgggttatttgtttgttgtttgtttttttttattagaatgtgagttttatgaggatttagtttttgtttgtttatttatcgttatgtttttagtaattgaaaatgtattaggtaaatagtagatgtttaataagaatttattttatgaataaatgggaaaaagataatttgagatattagtgtaggggttatatgaggaagaagaagggatatgagagttaattagttgggattgtttttgtaattaatttttattgagttttttgtgagtattaggtatttttttaggtgttggaatatggtaaggaacgaaatagggcgaaatatttgtgtttgtggagttgatatttattaaaagttggggaggttgggtacggtggttaatattagtaattttagtattttgggaggttgaggtgggtggattgtttgagtttaggagtttaagattagtttgggtattacggtgaaattttatttttattaaaatataaaaaaattagttgggtgtggcggcgtgcgtttgtaattttagttatttgggaggttgaggtaggagaattgtttgaatttaggaggcggaggttgtagtgagttaagattgtattatgtattttagtatgggtgatagagcgagattttgttttaaaaaaaaaaaaaaaaaaatttaagttggggagatagattatgtgaataaaataaataagtaaaattagtataatagataaatgttgagaagaaataatgaaatagggtaggtaggaatcgagtattgggggtggttgaaattttaggtatagggaaggtgatttttgaattagggttttacggtagagacggagagagttttaatgtttacgggaagagtatattaggtagaaggaagtgttagtttagaggttttgaggtgggatggtgtttgttatgtttaaggaatattaaggcggttagtgtggttggagtagagtgcggggaagggtagaaggtgaggttatataggtgatgggagttagatagtgtaggtgatatataggataggattgtaggggtagggggagaaggatgatatattagttaatagttaatatttgtggagtatttgttatatattagaggtatttttttgtttaaatattaatttttaaaggatgtttattatacggtggtgtttggaatgtattataaaaagatatatgtgttaaagatatttttaagaatgttagtttatatatgaataaggattttttttttttttaaaaggatatgtttataaaattgaggtatgtaatatgttttatggaggtataggtataaaagttgtttttaagagtgttagttgtatatgtgaataaggattgtgttgttgtattgaaagaatgtgtttataaaattgtggtgtatagttgggtatagaggttgaggtgggaggattatttgagtttaggagttttaggttagtttgtgtaatatagtgagattttcgttttcgaaaaaaaatttaaaaaataattattgtggtgtgtataatatatttttttaaaggtataggtataaaagatgtttttaagagtgatttgattttttggtatttgggtagtgttattttagtaaatatttattgttaaatattatggtgtttggaatatattatataaaggtatatgtataaaaaagaagtttttaataatgttatttgtaaaaataaaaaaaaaagttaattttttaagttttttatagaagtattttatagaattgatatagttaatttttatagaagttttggagggtaggtgtatttttgagaatatttgattttgagagtaaaatatttttattttatagatgaggaaataagtaaagagaggttgagtaatttgtttagggtaattttgagttagaatagttagaataggggtagaggaatataaggttgaagatttagaaagaagaatagatttgtaagggtaggtaggttatttggtatttttgattacgtagaggaagaatgaattttttttggaatgcgatgattgtgtaattgagtttatgaagtgagggaagagttttttttgcggggagagtagttcgtgtttatttttagaggttggaattgtttcgggaacggtagatagtttagggtggttgttttagagtttttgtatacgtcgttcgtttcgtttgaaggtttttttttatagagggtagtttggtttgttatttttttttttttaggttaggtgttatttttttggggaagaattttttgtatattttgtgtaaaaatagtatttttgttattttttaggattttatttttttttgtttttttttatggagaattggtggtgtaaggcgattgtttattagagttaaattatttaggttttgaatttcggttttgttaatttttagttgtgtgatttggggtaggttatttttttgtatttttattgttttatgtggaaaatgggggaaatgataatttttattttttaacggtggtttgaggatttaatgagttaaatgatttaaagagtgtgtagtttacggtaaggatcgtatgtttggtttgtatttttaaattattaaaatgtatttatagtatattcgtagatgtttgataggtttttgaaattgattatttttaaaattggtgtgattttttttaaaatttatttttttgtaaggtttttattttagttgattataatgttgtttttgtgggtgattaggttataaatttagatttattttggattttttttttatttttttcgggtatgttatttgttagtaagttttattttgtgtttaggttttttttagattttagttatttttcgttagttttattgttattattattatttatcgtagtggtttttttagttttaatagtttgttttttttataatcgttagggggattttgttgaaattttagttatagtttgttatttttttgtttataatttttttgtggtttttgttttatttaatattttgatagtattcgaaaaagtttggtttagtttggttttcgttattttgtttttttttttcgttgttttttttttttttttcgaatttatgttagttttttttttttatgttatttgttaggtattttttagttttgggttttttatatcggttgtcgtttttatttggtttgttgtttttagatatttacgagtttagtttttttatttttttttggtttttgtttagttgttttttttttggcgattatttttttttgattttttatgtaaaagtaatagtttttttttgtttgattttttttttataatttttattattatttgacgtatttttgtatatgtttgtttttttttttatttgttttttttgttaagatgtgagtttttttggagtagggattgttgtttgttgcgttttcgattgtattcgtagtatttggtttatagtatgtatttattaaatgtttgttaagtgaaggagatggaaagaagtaaatatatttaagtaaggtagattattagaatttttatgaggggttaagtgggagaaataataaaatataaagttttgtgtgttgttgaagttggaagtttatcgttattttttatttagttgataggttttgttgtagttgaaagaagaattggtaaaattgtttgtttttgttattaggagttattttgaattttttggatttttgaaataagtttgtttgtaaaataaatttagtgaggtttttggtgataggattttttaatcggatattttatggttttgtgatttgtataattgaataggaagtttatgtttatttttagtttgtttttaggaaagaaagtagtaatggggtgatagggaggattttgttttttgaaggatatgttgagagggaatagtcggtgtgaggggtcgtttagtttaatggtgaaatgtttagttaattggaatttgattgtttggttttaaatgttggttttgttatatgtggtttgtggaaggtacgtagatatttgtgttttcgttgttttatttataagttaatgataggaagattatttattttttagaggtatgattagggataaataagttaatgtttattaaaaaaaaaaataatagtataggtgtatatgtttttatttaaaatttttggggttagatgtgttttagaatttttatttttttatattttagaaaggtaatatgatgtatatacgatgttatataatattttttagtaagttttgtaatcggttgtgtttatatttttgtagtaaaatgtatgaatattcgtaataagtgagatttaataaagattagaaagggttttgttttattttaaattaggttttgttattaaaagagttaaaagaagttttttgtttttagagtattttggatgttggaatggtagataagggattatgaataaattagaaattaatatttagagtttattatatattttaggtatataatatttaatttgtataatatttttgtgaattaggtattgttatttttattttattaatgggtatattattatttttgttttatatatgagaaaattgaggtataaagaggttaaagaatattagttaagcgtggtgttttatgtttgtaattttagtattttaggaggttagggagagaggattgtttgagtttaggagtttaagaatagtttgggtaatatagtgagattttattttttaaaaaaagaaaaagaatatgtttagggttatatagttaataagtggtagaattaggatttaaatattggtaatttggttttagtgtttgggtagttgtttagtaggttatattgtttttttgtttagaagagtgtttgatgtgtattaagtttttaatagatgttaattattgttgttattaagaaagagaatatttagggtcgagtacggtattttatatttgtaattttagtattttgggaagttaaggtgggaggtgggtggattatttgaggttaggagtttaagattagtttggttaatatggtgaaattatgtttttattaaaaatataaaaattagtcgggcgtggtcgtgggtatttgtaattttagttatgcgggaggttgaggtatgagaatcgtttgaatttgggaggtagaggttgtagtgagttaagattgtgttattatattgcgttttagtttgggtaatagagagagattttattttaaaaaaaaagaaaaaaaaaaaaagaacgagaatatttagggatagtaataggatagagagattaggtatttatttagttttaggacggttttataaaggaaaggatttttgggttgggatttgaaagataagaaagattgttaggcgaaagaaggaagttttacgtggagtgagtagtttttgtaagggtttggtaaaaaaaaaattttttgaaaaatttgatattgatatggtagaagatatagataatatttaaatgaggaggatggaattagttttttatttttgttgtaataaataattataaatttagttgtttaaaataatatatttgttattttatagttttgtaggttagaagttttatattggttttagttgaaattaaggtattggtagggttgcgttttttttggaggttttaggggaaaatttattttttgtttatttaagttgttggtagaatttaattttttgagattgtaggattgaagtttttgtttttttattgtttgttagttgatagttatttttagttttaagaggttgtttatagtttttgattttgagttttttttttttatttttaaagttaataatggtaggttgagttttttttatattttgaattttttttgttttttttgttattatatttttgagttatttttttttttttattatttgttttttagagtttatatgattagattgaattttattaaataatttagaaataatttttttgttttagggtttgtaattttaattttatttgtaaagtttttttttgttatgtagtgtaaataatatataggtttcgaggattaggatgcggagtagggttggtattatttggtttattatagtttgttttttgatttttatagatttatatttgttttatatttaaaatatatttatattattttaagatatttatgagttgtattttattatagggagtattttaagtaagattggggagttagaagttagtttgggaaggtttagggaatgatggtagggtttgaagatagagatggagaaaagatgataaaaaaaggaatttttttttcgttgatttttgttttttttatgtttatagttttttaatttagttgtttgttttttagg

SEQ ID NO: 154 - DNA, 14147 bp, Artificial Sequence
  chemically treated genomic DNA (Homo sapiens)
tttggagagtaaatagttgagttgagaggttgtggatataggaggggtagaggttagcgggaggaggatttttttttttgttattttttttttatttttgtttttaaattttattattattttttaaatttttttagattaatttttagttttttagttttgtttgggatgttttttgtgatgggatataatttatgggtattttaggatggtgtgaatgtattttgaatgtgaaataaatgtgaatttgtgggggttagagggtagattgtggtaggttaaatgatgttaattttgtttcgtattttaattttcggaatttgtatgttatttatattatatagtagaaaggaattttgtagatgaaattaaggttataaattttaagatagggagattatttttggattatttgatgaaatttaatttaattatatgagttttgaaaagtagatgatggagaaagaaaggtagtttagagatgtgatgatagaagaggtaggggagatttaaaatgtgagagggatttaatttgttattgttggttttgaagatggaggaaggaggtttagaattaaggattgtgggtagttttttaaagttgggaatggttgttagttgatagatagtaaggaaatagggattttagttttataattttaaggaattggattttgttaataatttgaatgagtaggaaatggatttttttttagagtttttagaaggaacgtaattttgttaatattttgattttagttgagattagtgtgggatttttgatttatagaattgtaagataataaatgtgttgttttaagtagttaaatttgtgattatttgttatagtaagaatagaaaattagttttattttttttatttgaatattatttgtattttttattatattaatgttaagttttttaggaggttttttttttgttagatttttgtaaaggttgtttattttacgtggggtttttttttttcgtttagtagttttttttattttttaagttttagtttaaaggtttttttttttatgaagtcgttttaaaattgaatgaatgtttgatttttttgttttgttattgtttttgaatgttttcgttttttttttttttttttttttttttgagatggagtttttttttgttgtttaggttggagcgtagtatagtggtataattttgatttattgtaatttttgttttttaggtttaagcgatttttatgttttagtttttcgtatagttgggattataggtatttacgattacgttcggttaatttttgtatttttagtagagatatggttttattatgttggttagattggttttgaatttttgattttaagtgatttatttattttttattttggttttttaaagtgttaggattataggtgtgagatatcgtgttcggttttgaatatttttttttttgatgatagtaataattaatatttattgagagtttaatatatattaggtatttttttaagtagagaggtaatatggtttgttggataattgtttaggtattagggttagattgttagtgtttgaattttggttttgttatttattagttgtgtgattttgggtatattttttttttttttttaagaaatggggttttattatgttgtttaggttgtttttgaatttttgggtttaagtaattttttttttttggttttttaaagtgttaggattataggtatgaggtattacgtttggttgatattttttaatttttttgtattttaatttttttatgtgtaaaatagggataatgatatgtttattagtaaaatggggataataatatttagtttatagagatattgtatagattaaatattatatgtttgaggtgtatgataagttttaaatattagtttttgatttgtttatagttttttatttgttattttaatatttaaaatgttttaagggtagaaagttttttttaatttttttggtggtaaaatttgatttgaaatgaaataaggttttttttggtttttattgaattttatttattgcgagtgtttatatattttgttgtagaaatatgaatatagtcgattatagagtttattaaggggtgttatgtaatatcgtatatgtattatgttatttttttgaaatgtgaagaaatggaaattttgaaatatatttggttttaggggttttgggtaagggtatgtatatttgtattgttatttttttttttaatgggtattgatttatttatttttgattatgtttttgagaagtaggtagtttttttgttattaatttataaatgaggtagcggaggtataaatgtttacgtattttttataggttatatgtggtaaagttagtatttggagttaggtagttaggttttagttgattaagtattttattattaggttaaacggttttttatatcgattatttttttttagtatgttttttaaagaataggattttttttgttattttattattgtttttttttttgagagtaaattggaaataaatatgagttttttgtttaattatataagttataaagttatgaagtgttcgattagagagttttgttattagagattttattgaatttgttttgtaggtaggtttgttttagaagtttaaagagtttagagtgatttttggtggtaaagataggtaattttattagttttttttttagttgtaatagaatttattagttgagtgaaaggtgacggtgggtttttagttttaatagtatatagggttttgtattttgttattttttttatttgattttttataagagttttagtaatttgttttgtttagatatgtttatttttttttattttttttatttagtaagtatttggtgagtgtatattgtgggttaggtgttgcggatatagtcgagaacgtaatagataataatttttgttttagaggagtttatattttagtaggaaaggtagatgagaaaaaaggtaaatatgtataagagtgcgttagatggtggtaagggttatgggaaaaaaattaagtaggggagagttgttatttttatatggagagttaggggagagtagtcgttaaggaggggataattgggtagagattaaaaggaggtgaaggaattgagttcgtgagtatttgagagtagtaagttaggtggaagcggtagtcggtgtgaagggtttaaggttggagagtgtttggtaggtgatatggggagaggaggttgatatgggttcgggggagaggagggaggtagcgggagaggagaatagagtgacgggggttagattgagttaggttttttcgggtgttgttaggatgttgagtgagataggagttataagagggttgtgaatagagggatgataggttgtgattgagattttaataggatttttttggcggttgtgagaagaatagattgttggggttgaagaagttattgcggtagatgatggtggtagtagtggggttggcgagaagtagttggggtttggagaaagtttgaatatagaataggatttgttgatagatagtatgttcgggggaggtgagagaagggtttagggtgagtttaggtttgtggtttaattatttataaagatagtattgtggttagttgaggtgggagttttgtaggagagtaagttttgaggggggttatattagttttggagatggttagttttagaggtttgttagatatttacgggtatgttatgaatatattttaataatttaaaaatgtaagttaggtatacgatttttatcgtgggttgtatattttttgaattatttaatttattgaatttttaaattatcgttaaagggtggggattattattttttttattttttatatgaggtaatggaggtatagagaagtaatttgttttaagttatatagttggaagttggtagagtcggaatttaaaatttaagtggtttggttttagtgagtaatcgttttatattattagttttttatgaagagaaatagagaagggtaagattttagagagtgataggaatgttgtttttatatagggtgtataaggagtttttttttaaggaagtgatatttggtttgaaggaggggaggtagtaagttaggttgttttttgtgggggagggtttttaggcggagcgaacggcgtgtataaaggttttgaggtagttattttgaattatttatcgttttcgagatagttttaatttttgagggtaagtacgggttgtttttttcgtagggagagttttttttttattttatggatttaattatataattatcgtattttaggaagaatttattttttttttgcgtgattaaaggtgttaaataatttgtttgtttttgtaaatttgtttttttttttgagtttttagttttatgtttttttgtttttgttttggttattttggtttaaggttattttgagtaagttatttagtttttttttgtttgtttttttatttgtaaaatggggatattttatttttaaagttaaatatttttaaaagtatatttattttttaaggtttttgtgaggattaattgtgttaattttgtaaaatatttttgtaaaagatttgaggggttgatttttttttttgtttttataagtagtattgttaggaattttttttttatatatgtgtttttgtatagtatattttaagtattatagtgtttaataatgaatatttattgaaataatattatttaggtgttagaaaattaaattatttttagaaatattttttatgtttgtgtttttaggagagtgtattatgtatattatagtggttattttttgggttttttttcggagacggggattttattatgttgtataggttggtttggaatttttgggtttaagtgatttttttattttagtttttgtgtttagttatatattatagttttgtgaatatatttttttaatgtaataatatagtttttatttatatatataattagtatttttagaaatagtttttatatttgtgtttttatagagtatattatatattttagttttgtgaatatatttttttgaaaaggaggaaaatttttatttatatataaattggtatttttagaaatatttttgatatatgtatttttttgtagtgtattttaggtattatcgtgtggtaaatattttttgggggttggtatttgaatagaaaagtgtttttgatgtgtggtagatattttatagatattagttattagttagtgtgttatttttttttttttgtttttgtaattttattttatgtattatttgtattatttggtttttattatttgtgtgattttattttttattttttttcgtattttgttttagttatattggtcgttttgatgttttttgaatatggtaggtattattttattttagggtttttgaattggtatttttttttgtttggtatgtttttttcgtagatattaaggtttttttcgtttttatcgtgaggttttaatttaagagttattttttttatgtttaagattttaattatttttaatattcgatttttatttgttttattttattatttttttttagtatttgtttattatgttaattttatttatttattttgtttatatagtttgtttttttagtttgggtttttttttttttttttttgagatagagtttcgttttgttatttatgttggagtgtatggtgtaattttggtttattgtaattttcgttttttgggtttaagtaatttttttgttttagttttttaagtaattgggattataggcgtacgtcgttatatttagttaatttttttgtattttagtagagatggggttttatcgtgatgtttaggttggttttgaatttttgagtttaggtaatttatttattttagttttttaaagtgttaggattattggtgttagttatcgtgtttagtttttttaatttttaataaatgttagttttataagtataaatatttcgttttgtttcgttttttgttatattttagtatttagaagagtgtttggtatttataaggggtttagtaaaggttggttgtaggaatagttttaattaattagtttttatattttttttttttttttatgtgatttttatattggtgttttaaattattttttttttatttatttatgggataaatttttattgagtatttgttgtttatttggtatatttttagttgttggagatatagcggtgaatgagtagataaaaattgagtttttatgggatttatattttaatgaggagagatagataataaataagtaatttatatagtgtgttagatagtgataaagggtaacgggataaattagggatttggtttgagttttgttgggtgtgtagttttagatggttagggaggggttgattttttttgtttttataagtagtattgttaggaattttttttttatatatgtgtttttgtatagtatattttaagtattatggtgtgataattaatttttaatgaaataatattatttaggtataataaaattaaattatttttagaaatattttttacgtttgtgtttttaagagagtgtattatatatattatagtggttgttttttgggttttttttttttagaaaaagggatttcgttatattgtttaggttggtttggaatttttgggtttaagttatttttttattttagtttttcgagtagttgggattataagtgtatatttttgtgtttagttatatattatagttttgtgaatatatttttttaatgtaataatatagtttttatttatatatataattagtatttttagaaatagtttttatatttatgtttttatagagtatattacgtattttagttttgtgaatatatttttttgaaaaggaggaaaatttttatttatatataaattggtatttttagaaatattttttatatatgtatttttttatattgtattttatatattatagtgtggtaaatattttttgggggttggtatttgaatagagtgttgaaaggaattatgtagagatttgggggtggtgtttaaggtataaagaatagttaatgtaaaggttttgaggttggtttatgtttgttatgtttgaggagttgtgtggtggaattagtgtggttggagtatagtaagggggtgggaaggtataggcggtaatgttagaaaggttatttgttttattattaatttatagttaatatttatttatattggaagggattttagttttgattttttattttataaatgaagaaaaaggtatagagaggaagtggttaaattatttatttaaggttatatagttgttgggattggggggtgggtgggtgttgagagaaggtgaggaatgaagattgttttgtaggtagagggaatagtaagaataaaagtttggaggtgagaattaatttggtttttaaggattgaggttttacgtggggtgggatgagatttaagaggggagttttaaaaattattttgtgttttgagtattttttgggttatttttgagtaaggaatttaatttttttatggtttaatttttttattatttattttatggggttgtggtgaggattaaaggaatttatttatatgaaatattttgtttgatatacggtaggtgtttaataaacgttagtttttattggtattattattattattggcgttaatgtatttatttattgtagtgaggtagaacgtttttgtggttacgagtgtgattaggttgatttattattaagaggtggaggatagggaaggtcgtatagtgttttattataaggaaaagaggattagtacgtttttttttgggaagggaaaaaaaaagagaaggaaattgaaagtatacggtcgatttttttttaattataaagtattggatttacgggagggtatgcgggggattgtgtaagtatataggggtgtgggggaggaaggttaatgaatagatttattgtaaagggaggggtgatgaggtttatcgtttgaggggaaggggagtagaaaattttatagatttttgtattatagtgagaggagagaaaagttattatatagattgatttaaagtagagagggaaaaggttatggattgagttattgaaaatagggagatgtaaagtattaaattaatttattattaaaaaggagagaattttaagcgttagagcgatagtttacgaaaaagaggagatagggtaatggattgatagttaaagggacgtgaatttaaatatgaagattgatttattataaaatggtggtggtggtggtggggggggggggtggttttgaaaaaagttatggattgatgtattgggggattggaggaggtaggaatataaatttaggtagatttattgttaaagagggatgcggaggagtgcggcgttacggattgattcgttacgatgtataggaagggtggaataaataaggttacggacgggttttttgaaagttgaggttaggagaaatttaaatatttagatatatttattattaagggggttgaatattgttataggttagttttttataagtgggggtgggtggggggcgggtgggggtaggggtagggggaaagtttatggacgagtttattttaagttggcgtggggaaaaatataagtacgtagatcgatttattatataacgggagggggaggttaggttacggttagatttattataagggacgaagggtttgagtaatgttatacgtaggtttattagtcgtggtggtggcggcggggagtcgaatattagtaggttatcggttaagttatattttttgcgcgggggcgggaaggatacgtggggttacggattgggttttttattttttaggtttagagtttatttgtgtgtagcgtggcggtggcgttggtaatgttggtagtttcggggggcgggggttttatacgcggttttatcgttttttaggtttgggtttcgaggcggcggtggaggtggtggtggcggtggcggcggtagtatttagaagtcgtttttgcgtttttttatagtttacgtgggttcgaggaggaggagtttaatgtttcgtcgttcgttgattggttaaagcgttattaatcggtcgtaaggtttcgaggggttgggggacgggtttttttttatagagttgtgtcgtgattggcgtaaggggaaatgatggaacgtttacggtttttggagtttcgaggaggcgcgttcggtttttacggtgttttacgtcgattggtttaaggattgacggattgtgagtaattgaaaaggttcggggtttgtgtcgggggggcgggggtttgttttatattgattggtttatatgggattgatggaagatagtttttaaggacgggggtgggtggttttgtttttttttgattggcggacgagggatttttagatttttgttaaaatattaagggggcggtgtcgtacgttatgttgtttagcggaagtagggtttgtatagaaatgggcgtagtagtcggcgggagtgggtcggattgggtttcgcgtaggcgggtagggtagttttacggttagataagattatagagttgggtaaagacgaatttagaatatagcggaggtaggagggtaggatggttgttaggtatacgaaagagtattgagtggtagaaacgaaatgtttttagagggtagggttgaattgcggttagagttaaaaaggggaggaatttggttttgtattgattggcggtggttggatttaatttagaataggggttcgattagggagagcgggatttaggtttgtgtttattggaagttggaatatttataagtaggggttaagataaggtagggttgagttagggtttgggtgtaatttggggtatttggggaatgattgggtgtgtgaaagcgtaaattttagggttttttgattgttgtgggaatgaataaatttttattatgaattggtttattttttatggtaatttaaagggtggcgtttaggaaaaggaatggaagaaagggtgaggtggggggtttaggttgttaagatgatagaagagagggtagtgtataaggttaattggtaaatattgttaggtaataggttggaggtaggattgttggggtattttggaggttttatagagagattggatttttgggttttttagtaattttgtgttttaggaataggttttcgtggtaattagtagggtttatggggaaaaagaagggttatgtgatttaaaggtatttaggttttttaatgtttgaggatggggggaagaagttaatggtgaggtttttttgggaaattttgtaggttttgtagttttttaagtttttgaaaaagaggatagaagagattgaataaagattgggtttgggttacgtttttaggtttgttttgattttttttttttgattttagtttagagggaaagatggttttttttttttttcgtttttttttttttttaggttattattttaaatatagagtttggtagtggggtgagttgtttttatttttagtaatatgtggatatgggttttgatatttatggagtttttggtgaggttgttgttgagtttagagaaaagaaataagaaagggtaaaatgggttttatatgattatgatgatttttttttattattttaagatttatttatattttggatgatttttatttggtttatttttatgtggaaatgttaagttattatttggtttttattgatttaaagattattaaatgtttattgtatgttaggtaattttaggtattgggagatagtagtaaatataataaataaaattttcggtttgatggattttaaatttttgtaaagaaagatataataaaaaattaatggaataaaagttatgtgttagatggttttaattataataataaaaattaaaaatgagagataataaggagtataggagtggggggttgtaattttaaagagggtttagggatggttttacggagaagtatttgagtaaagatttaaagatagtgaattttgagtagtgtggttatatggaggatgtgttttatatataaggggtagtaaatataaaggtattgaggtgggagtgtgtttggtatgtttgaggtgtagtaaagaggttattttggttggagaagaataagtgaagggggaatgtaagaggtgaggttagagaggtaatgagggagataaattgtgtgaagtttataaggttatggtaaggattttggttttgattttaagtgagatgggagttaagggaaggttgtagtagaggaaggaggttgaattatatgaattagttagttgattttttttttttaagttagtttggattagatttcgtttaaaagaattttaattgatataaagggttaaggaaggttttttttaagaatgaagaatgagaaggaatcgaagaatgtttaatggttaagtagtaggaaggttttttttataaaaaggataagaggtaataaagagttgtttgagaagtagtgaggttagagtgttagaaattgagtggggagggaaagtggtttaagataaggtttaagagataggaagaggttagattatatagggttttaatataataaggaatgtggattttattgtgttgttaatgtaggagttagtttgaggggtaaatgaaattaaatattgttggaaaagtagagagtaataagataggatgttaaattggaaaaaaaagtagtatgaatttatgtatatattaatattttttatatttttatttttagtttagaatttttttttgaatttgattagttttaatgatattttttaaaaatttattttagtgtttaataagtgttttatatttaataggttttagattaaatttttgatttttttttttaaatttattttttttttaatttttttattttagataatggtaattttatttttttagttgtttagttaaaaatttgggttttttttttttatattttatatttagttagttattttttttaaaattatgattgttttattgtaggtaatgtttttgatttttatgatatgttttttttatagtattgttaatatttgatatattatattatttatttgtttattgtttgttttttttgattagaatgttagttgtatgagggtagattttgtttttttttgttttttgttttatttttagggattagaatagtgtgtggtatagaggaggtatttaacgtatgttgaatgaataagtgattattttattaaaaggaatttgaggttggttgagtgtatgtttagggataggaaataaatgaagtatgggtgttgttgttagagagtaagaatatttttaagaatattttgggggtaatgtttaaagaatagaagaatgaatttgattagtttttaagggataattttaatattaaaaaagagaataaaattagttaatggtgtaagtttattttatgaaaatttatgagtttaatattttaaaagggagaaaaatatagagtttattaaatgttagttgtaatataaaagggatatgtttattattgttgatttatttttatttgttatgtgagaagtaaattattattgatttagtatgtaaggtagtgtgaatagttatatggttatgtttttttttttttttttgagatggagttttattgtgtcgtttaggttggagtgtagtggcgtgatttcggtttattgtaatttttatttttcgagtttaagcgatttttttgttttagttttttaagtagttgggattataggcgtttgttatcgttttcggttaattttttgtatttttagtagagacggggttttattattttggataggttggttttgaatttttgatttcgtgatttatttatttcggttttttaaagtgttgggattataggtgtgagttatcgcgttcggtcgttaggttgttttttttataattatatgtttatttatgagatgtggatgtgtatttttttttgtgttattaggaaagaatatagagattttattttttttattttttaaataaagaaatatattaagaataggaagaattgatatttttgattatataaaatgattagaaagttagtttaaagtatattttaagtaattaaatatttttaaaggatagttagttatatagatttaaatttttattttttagaaaaattaaatttttagatagttttattaattataataaagtagtaagatttaattatattttttattatattaatagattaggttagtatattaaaaagattaggtaagggggtaggtattgataatttaaatattttattttggggaagtacgtggagttttaaaatattaaaatttatttgataggtttaggaattttgtgatataataaggaaagtttttttatataaattagattttagttgggcgcggtagtttatatttgtaattttagtatttagggaggttgaggtgggtagattatttgaggtcggagtttgagattagtttggttaatatggtaaaattttgtttttattaaaaatataaaaattagtcgggagtggtggtgggtgtttgtagttttagttatttgggaggttgaggtaggagaattttttaagtttaggaggtagaggttgtagtgagttaagatcgtattattgtattttagtttgggcgataagagtaaaatttcgttttaaaaataaagtggatttggtttaaatgattattagtttagaattgtgttgattatgaaagtaggtcgtttaattaaattatttgttaattggtttgaatattaagaattagaaattttagtaggtttgaggtttttttgggtttattagtatttgttagttttttttatggttggaaaggtttgaaaagataaaaattattgaaattttaagggaggtaattttggaaaaaatgaatgtagaatagatataaatataaaatataattaataaagaagtttaaattaatggtatttatatttgtgagatgttgttaatttaagtgtattgtttagtgttttt

SEQ ID NO: 155 - DNA, 3120 bp, Artificial Sequence
  chemically treated genomic DNA (Homo sapiens)
aattttaagtttaggtcgggtatagtggtttacgtatgtaattttagtatttggagggatcgaggtgggcggattataaggttaggagattgagattattttggttagtatggtgaaatttcgtttttattaaaaatataaaatttagttgggtatgatggtacgtgtttgtagttttagttatttgggaggttgaggtaggagaatcgtttgaattcgggaggtggaggttgtagtgagcggagattgtattattgtattcgtttggtgatagagtaagattttattttaaaaaataaataaagaaaatttgaagtatagtatttttttaaattttaaatagataatagaaattggtttttttttatttaaattagaatttaagtttaattttatatatttttgatagtttggattttgttttttaattttataaaattgggaatttaagtattatttggttcgatttaaatgtaatgtagaatttgtattaaaatattatattaaagttttagatttgtagtagttaatagtatttttatgtatgtgttagggattgttttaaatattttatatatattaatttttttattttgtatttttgttttcgttttatatagtaggaaattgaaatattgagaggttaagtaattaaagttatagagttagagtgataggagtaaagttttaatttaggtaatttagatttttagagttttgatttttattattaagttgttagtatagtttttttggtaattatttttaatttaaatataattcgagtgatttatttaataagttattattttgataatttagtgatttgtaatgtaaaattatttattgtaatttatttaatattattgtttttttgtgttgtaaaaattatagtaatcgagatgtaatttattatttttttttttattttcggtattttgtgttaatttttttgttttgcggatttttttcgattttttattatgcgtgttaattgttattaatttttttgtttgttggggattggggtcgcgagggtatattttcgaggggtacggggttagggttaggtaggttgtgcggttgggcggggttttgtgttttattgcggagtgcgggtcgggaagcggagagagaagtagttgtgtaattcgttggatgcggattagggcgttttttattttcgtcgggagttcgtcgattggttgggtgtgggcgtacgtgatcgatatgtggttgtattggtgtagttcgttagggtgttattggagatagaatggaggtgttgtcggattcggaaatggggtaggtgttggagttattatggttaggtttgttgcggggggaggggggaaggtggttttttttcgtattgttttaaatcgatggtttttttttggtatagggtttattgtagtatgttaaacgaggaggtaggggcgtcgttttttcgttttttattgtagtattggagatggattttttgtatttcggatttagggtttttgatagaagaggaagaagggggaggggtagaagtgttaaggggagtttgttgagaaaagttgtttttgaagttagaaggggtttttgtttttataatgttatttgatagagtggaataatagtatttaaggaaacgggtagaggataataaagaatggagtatatttatggcgaggagtaaaagttttattttattgaaaggtttttttttttttttggcgataaggatatatgtattggtggttaaaagagagaggagataaaatcgttgtagatggttgatgtgaatttagtggaaagagttattggggatgagagaaagaggaggaggtaggtattgtagagcgtgagtggtggtgttggttggtgaaatattggttattagtagtgtgtttgtttttgtaaaatatttaagtaaattttttgtgaatagggtggtaaatagatattagtgtttttgttagttataaaatgtagtggtagtggttttttgcggacgattgtagtagtgttttttttttttttgttaggtcgaaaagataattgtagaggaataagaaattttgtagtaaatgttggggtagaagtttatttataagaagttatagtttataaatgtagtttgaatagtagaaaaaaaattattgttttttaaagtaggaataatgttaggttatgaatgttttgttattggaatgtattggatattttgattttatattacgaaagtgatgtttaaattttttgatttaatataaattttatacgaaattttaataaattatgtatgaaatagtggatttttttttttgttagtgaagtttttatgttattaattaggttatttaagagtaaattattttataacgtaaattattttgttaaaaattatggtgaataaatttttgtaggtttaatatttaagatttatagttaagtaattttatatttttttttggttgtttttagataatattgaataaatatttaagatattaatttagtgtgtaaatattttaaattaaagtaatatggttttttttttagatgtatttttgtttagtgagtatttatgagatatatttttgatataaagtgttttttattgagttttttttttttttatttaaatgtaaaagtttatttttatgtatatttatagtagttagtttgttatatttttttattttttgaataaggatggtagtggttttgtaaagttttttagggttagtgatagtgttttttaaataatgtttatgtaatagaaagttttaagatgatttattatattgttttagtaatatttttaagataatgcggaattgggttggtttagataaataagattatataagttttttattgataaatttaaatagttttttaaaaaattatttttgttttaagaattatttgattatggatattagggttaatagtatttaggagtcgggcgtggtggtttatgtttgtaatataagttaaataggaggttgagggaagttgaggtaggaggattatttgagttttggcgtttaagattagtttgggtaattaagtaagattttattttaaaaaaaagtatttagagttttttttttaaaatttgat

SEQ ID NO: 156 - DNA, 3120 bp, Artificial Sequence
  chemically treated genomic DNA (Homo sapiens)
attagattttaaaaaagagattttaagtatttttttttgagatagggttttgtttggttgtttaggttggttttgaacgttaaggtttaagtgatttttttgttttagttttttttagttttttgtttagtttgtattataggtatgggttattacgttcggtttttaagtattattaattttgatatttatgattaagtaatttttaaagtagaaataattttttaaagaattatttaaatttattagtgaaaaatttatgtagttttatttatttaagttagtttaatttcgtattattttgaaaatattattgaaataatataataggttattttaagattttttattatataaatattatttaagagatattgttattgattttggagggttttataaagttattgttatttttgtttagggagtggggaggtgtggtaggttggttattataagtatgtataaagataggtttttatatttaggtaaaggaaaaaaaagtttaatgaaaaatattttatattaagagtatattttatgagtatttattaaatagaaatatatttagaagaaaagttatgttgttttaatttaaaatatttgtatattgaattaatattttaaatatttatttagtgttatttaaaagtaattaaagagaaatataaaattatttaattataggttttaaatattaggtttataaaaatttgtttattataatttttgataaagtaatttacgttgtaaagtggtttgtttttgaatgatttaattaatggtataaaagttttattaataaaagaaaagatttattgttttatatataatttattaagatttcgtataggatttatgttaaattaaagaatttgagtattattttcgtgatgtagaattaaagtgtttaatatattttaatgataaaatatttatagtttgatattatttttattttaaaaaatagtaattttttttttgttgtttaggttgtatttataaattatggttttttgtaaatgggtttttattttagtatttgttgtaaggttttttatttttttgtagttgttttttcggtttaatagagggagaaaaagtattgttgtagtcgttcgtaaaaagttattattattgtattttgtaattaataaagatattggtatttgtttgttattttgtttatagggagtttatttagatgttttataaaagtaggtatattattggtgattagtattttattaattaatattattatttacgttttgtagtatttgttttttttttttttttttatttttagtagttttttttattagatttatattagttatttgtagcggttttgtttttttttttttttggttattaatgtatgtgtttttgtcgttagggaggaaaagaagttttttaatggggtagagtttttgtttttcgttatgaatatgttttattttttgttgttttttattcgtttttttagatattgttattttattttgttaaatggtattataaaaataaaaattttttttggttttaaaaatagttttttttagtagattttttttaatatttttatttttttttttttttttttttttgttaaaaattttggattcgaagtataggaaatttatttttagtgttgtagtggggggcggggggacgacgtttttgttttttcgtttggtatgttgtagtggattttgtgttaaggaaaggttatcggtttaagatagtgcgagggaaaattattttttttttttttttcgtagtaagtttggttatggtggttttagtatttattttattttcgagttcggtagtatttttattttgtttttagtgatattttggcgggttgtattaatatagttatatgtcggttacgtgcgtttatatttagttaatcggcgggttttcgacgggaatggggagcgttttggttcgtatttagcggattatatagttgttttttttttcgtttttcgattcgtatttcgtagtggggtatagggtttcgtttaatcgtatagtttgtttagttttagtttcgtatttttcgggggtatgttttcgcggttttagtttttagtaagtaaggaagttgatggtagttgatacgtatagtaaagagtcgggggaggttcgtagggtagaaggattagtataagatgtcggaggtgggagggagagtaataaattatatttcgattgttatgatttttgtagtatagagaaataataatattaaatgaattataatgaataattttatattataagttattgagttgttagagtgatgatttgttagatagattattcgaattatatttgaattaaaaatagttattagaaaagttatgttagtagtttagtagtggagattagaattttggaagtttgggttgtttgagttgaagttttatttttgttattttagttttgtaattttagttatttaattttttagtgttttaattttttgttgtataaaacgggaatagaagtatagaatagaggagttaatatatatgaagtatttagagtagtttttgatatatatatagaagtgttgttagttattataaatttgaggttttaatgtagtattttaatgtaaattttatattgtatttaaatcgaattaggtgatgtttaaatttttaattttatgaggttgaaggataaaatttaaattgttaagaatatataaagttaaatttaaattttggtttaaatggggggaaattagtttttattatttatttaaaatttaaaaggatattatattttaagttttttttgtttgttttttgagatagagttttgttttgttattaggcgagtgtagtggtgtaattttcgtttattgtaatttttatttttcgggtttaagcgatttttttgttttagttttttaagtagttgggattataggtacgtgttattatgtttagttaagttttgtatttttagtagagacggggttttattatgttggttaggatggttttaattttttgattttgtgattcgtttatttcggtttttttaagtattgggattatatgcgtgagttattgtgttcggtttaaatttaaagtt

SEQ ID NO: 157 - DNA, 2501 bp, Artificial Sequence
  chemically treated genomic DNA (Homo sapiens)
ttatacggttagaaagggtttaggcggttttcggcgtttttttagtttttgtttttatggcgtattttttcgttagtcgttttttttcgtatttcgtcgttcgttcggttcggtcgcgtgcggtttttcgggagtttttatttcgtcgcggattttagcgattattaagttcgtacgcggtttgtcgtaggtttgagtagaaggtttcgcgtatatttatcgcgtcgcggtcgcgcgggaggtttgtgtcgttcgcgttatttattggtcgggtttcgcgggcgtagcggagcgggcgggtggtcggttcggacgcgtttttttcggtcgcggtttcgcgcgttatgtgttttcggcgggacgcgttattttcgggtttgtcgcggcgtttttaattcgggttagggagcggggcggagggggcggtcgggtggtttagaggagggtttttttttttttttttttttgaatgaatcgtgtgacgttacgtataggaaatcggtcgggttgtgtagagaatgaagtaagaggataggtattatagtttcgttttcgttttttttttttcgcgttcgttttttcgcgtcgtttgttcgttcgttcgtcgcgttttcgttcgtcgtttttcgtggtttcgtcgcgttgtcgtcgtcgtcgttgttagtagaaggtgtcggggtttcgggttttttttgtcggcggtcgttagcgttcggagcgggttgcgcggcgggagtttcgggaggcggtcgtagttagcgtcgtcgcgtaggattaggaggaggagaaagggtgcgtagttcggaggcggggtgcgtcggtggggtgtagcggaagagggggtttaggggggagaatttcgtagtagttattttttttaggaaaagagggaaaaaataaaatttttttttattatttttttttttttatttttcgtcgtattatatatagcgcgggtttttagcgttcggtatcggcgggttaggcgcgttttgtttttatttatttagtagtttttcggaaaatgtatttgttgttcggagtttaattagaagaggatttttgttttcgttttcggtttttttatcgtttttttttttttgttttttttttggggaggcgtgaagcggtttcgtggatagagatttatgtttgtgttcgcgcgtgtgtgcgcgcgtgtaaattgtcgagaaggggaaaatattataggatttttgcgaatatcggattgaaaattgtaatttatttgtcgtcgtcgttgttttttttttttttcgagtttttgagattttcggttgggatttttgcggattgatatttttgtgaagtagaagtttgggaatcgatttggaaatttttttaatttttatttttttttttcgcgatttttgatttattgggaagttttaaattagttataattggagagtgttgaagattgatgggatcgttgttttatgtatttgttttggttttataaaaaggaaatttgatagaggattatgttgtatttaaaaaatataagtaagttttttgtataggaaattggtttaatgtaatttttaatggaaatttttgagattttttatttaaagtgtattcgagtaaatttaatttttaggtagtttaatatattttttttagtcgtgttatttgtagtgtgtatgttttgtttttatttagtgtgtatagggaaacgtatttgattttttatttattagtttgttttttttttaattttttagtattatagaggaagtagattgatattaataatatttattaataataacgtgttttatgaaataaagattcgaaaggaattggaataaaaattttttgtattttatgttaagggggaaatattagaattaagtgtttcgcgtgattgaagatattttttcgtttaagaatgtaaagtatatttaataaaatagttggattataattttttttttttttttgggggtcgtggggtgggagttggggcgagaggtgtcgttggttttcgttgttttttttttgggaaggatggcgtacgttgggagaatagggtacgataatcgggagatagtgatgaagtatatttattataagttgtcgtagaggggttacgagtgggatgcgggagatgtgggcgtcgcgttttcgggggtcgttttcgtatcgggtattttttttttttagttcgggtatacgttttatttagtcgtatttcgggattcggtcgttaggatttcgtcgttgtagatttcggttgttttcggcgtcgtcgcggggtttgcgtttagttcggtgttatttgtggtttatttgatttttcgttaggtcggcgacgatttttttcgtcgttatcgtcgcgatttcgtcgagatgtttagttagttgtatttgacgttttttatcgcgcggggacgttttgttacggtggtggaggagttttttagggacggggtgaattgggggaggattgtggttttttttgagttcggtggggttat

SEQ ID NO: 158 - DNA, 2501 bp, Artificial Sequence
  chemically treated genomic DNA (Homo sapiens)
atgattttatcgaatttaaagaaggttataatttttttttagtttatttcgtttttgaagagtttttttattatcgtggtaaagcgttttcgcgcggtgaagggcgttaggtgtagttggttggatatttcggcgaagtcgcggcggtagcggcgggagaagtcgtcgtcggtttggcggagggttaggtggattataggtggtatcgggttgagcgtaggtttcgcggcggcgtcgggggtagtcggggtttgtagcggcgaggttttggcgatcgggtttcgggatgcggttggatggggcgtgtgttcgggttgggaggagaagatgttcggtgcgggggcggttttcgggggcgcggcgtttatatttttcgtattttattcgtagtttttttgcgatagtttataatggatgtattttattattatttttcggttatcgtattttgtttttttagcgtgcgttattttttttagaggaaaagtaacgggggttaacggtatttttcgttttagtttttattttacggtttttagagaaagaagaggagttataatttagttattttattggatgtgttttgtatttttggacgagggggtgtttttaattacgcggaatatttgattttggtgttttttttttggtatgagatgtaggaaatttttattttaatttttttcggatttttattttatgaggtacgttattattagtaagtattgttaatattagtttattttttttgtgatgttgaaaggttaaagaaaaaataaattaataagtaaaaaattaggtgcgtttttttgtatatattgagtgaaagtagggtatatatattataagtaatacggttaaaaagaatgtattaagttgtttggaaattaaatttattcgaatgtattttaagtaaaaaattttaaaggtttttattgaaagttatattaaattaattttttgtgtagagaatttatttgtattttttaagtatagtatgattttttgttaagttttttttttgtaaaattaaaataaatgtataaggtaacgattttattaatttttagtattttttagttatagttgatttgaaattttttaatgaattaggagtcgcggggagagggagtaaaaattaggaggatttttagatcgatttttagatttttgttttatagaaatgttaattcgtaggaattttaatcggagattttaagagttcgagaaaaaaaaaaggtagcggcggcggtagatgaattataatttttagttcggtattcgtagaagttttgtgatgttttttttttttcggtaatttatacgcgcgtatatacgcgcgggtataggtatgaatttttatttacgggatcgttttacgtttttttaggagagagataggggagaggggacgatgaaggagtcggggacggaggtaggaatttttttttgattaaatttcgaatagtaaatgtatttttcgaaaagttgttggataaatgaaggtaggacgcgtttggttcgtcggtgtcgagcgttagaagttcgcgttgtgtgtggtgcggcgaggggtggggagaaggaggtggtgggggagggttttattttttttttttttttttaaaaaggatgattgttacgaagtttttttttttggattttttttttcgttgtattttatcggcgtatttcgttttcgggttgcgtatttttttttttttttttggttttgcgcggcggcgttggttacggtcgtttttcggagttttcgtcgcgtagttcgtttcgagcgttgacggtcgtcggtagggagggttcggagtttcggtattttttgttggtagcggcggcggcggtagcgcggcggggttacggagagcggcgggcgggagcgcggcgggcgggcgggtaggcggcgcggaggggcgggcgcgggaggaagggggcgggagcggggttgtggtgtttgtttttttattttattttttgtatagttcgatcggttttttgtgcgtaacgttatacggtttatttaaaaaaagaagaaagaaagagtttttttttgagttattcgatcgtttttttcgtttcgttttttggttcgggttaaaggcgtcgcggtaggttcgggagtggcgcgtttcgtcgggggtatatggcgcgcggggtcgcggtcggggagggcgcgttcgggtcggttattcgttcgtttcgttgcgttcgcggggttcggttagtgggtggcgcgggcggtataggtttttcgcgcggtcgcggcgcggtgggtgtgcgcggggttttttgtttaggtttgcggtaggtcgcgtgcggatttggtggtcgttggggttcgcgacggggtgggggttttcggggaatcgtacgcggtcgggtcgggcggacgacggagtgcggaggggggcggttggcgggagggtgcgttatgaaaataagggttggaaaagcgtcgggaatcgtttggattttttttggtcgtgtga

SEQ ID NO: 159 - DNA, 6104 bp, Artificial Sequence
  chemically treated genomic DNA (Homo sapiens)
tagttttgaagtaggtagatatgtttatatttttttttgagttagtgtttggatttaggggattagattttttatttgatatggtagagagataagttatgttttaggtttttaaaaggagtttggaaaatataattaatttaagttaaatatttttattatttttttgtatatataataaagataaaaatatttattttattaaattgttgagagtaagaaagataatatatatatagtgtttggtatacggatggaatttagttgatggtagttataatatttataatattttttttttgttttaatttaatatgatttatatgattttttatatttattgtatatgtaatattttttagataattttatatttaggttattagtaaaatattgatattttttttagtatttatatagatgttttttttttaaagtttttagtaaaatttttattggggaattttagttgttttttatttttttttttttttatttttatttttatattaaaggtttttatttttaaggtatataatatgatattttgatatatgtatattttgtgaaatgattgtaataattaagttaattaatatattattattttatatagttttttgtgtgtgtgtgtgtgtgtgtgcgtttagagtttttgagatttattttttttgtaaattttaagtatatgttaattatagttattaggttgtatattaggtttttagaatttatttattttataattgaaaggttgtattttttaattagtattttttttttatttttaatcgtagttttaaataattattattttaatttttgttattgagttcgatttgttttttgagattttatatataagtgagattatgtattacgtgtttttttgtgttttatttattttgtgtgttataatattttttaggtttagttatgttggtataaatgataatattttttttttttgaataatattgttgattaatattttattgtgtgtgtgtgataaatatatattatattttttttaataatttatttattaatggatatttaggttgtttttgtattttggttattgtgaatttcgttgtttttttggtagttatttttgtatttttttttttagaagtagttttattgtagtttaaaagtgttttaggaaaatgatttagaagtaattattttttttggtatgttttttagtaaatacgatgatggaaagttttgatttttgtttttttttaaatagtgtaatcgatttttagttgggattttttttagttaatttgatagttttacgtttttattaggttgaagaaaatgtatgtgttgtgggttgttgtattattgttgttggtggtgttgttgttattgttgagattttgtggttgagtttatattataaaggaattgtagagtagtaataaatttaatttgagttttgaatttaagtttttaggtgtgatttttttaattacgtggaaatttacgtaagaatttttaattagattttatgtttatttttattttttaagtaaagggtataggaatttggtttaaacgaatgggaataaatattatagttagattttattggagtgttgtaaaaatgtttttttttaaaattagattgttttaaaattgattttggtttttagatttttaagttaggaagtaagatagtaaaaattaagggttaaatagttaagcgattatttttttaaaattagtattttttttggcgattttcgttagattatgttttgtttagtattgaaatttagagaagttttaggaatagcgggatgaaatttaagtgattcgtttacgggaagttttatttttttttcgttcgtttagtaaattcgggatgggtttagagaatgatttcgtattttgtattagaagattttagtttttagagagaattttagacgaaatttttatttttttgttttatttttgaaaatttttatttgggaatcgatttgttgtgataaataaaatgggaggagtttggttgaatagtttgtggatttcggaaagtaaagcgaaatgtcgttttaattaggttcgaattttttgtaagttattttgtgaaattggtgaatttgttagaatgaatttttatttatttaattttggcggatcgtttattagggtgtttggtatggtgttaattgttggagaaaatgatttttaaataaaaacgaaaaaaattttcggtttttagtaaggagttaggtaatttttataaatttaaggagtgtttgagaggtgagttaatgatcgttttttttgttttaaagagatagatttttatagttagttttgaaattgttcggggttatattagcgttttttggacgtagattttggttagcgttttacggtattagtttttgatttgtagttgttaaagatttgatagtggggagtacgtgtttattttgaaggttgaagatatatattatagttaggagtagaatttcgattttttaaagtgatatggttataaaatttgcgtttattggtttttattttgcggttatcgtggtacgggcgaaagttatgaattttttttttaggaaaatatatattatagatatatatatttataaacggttttaggaggtttttatgttagaaatttttggttttggaaaaaaattattttcgttgaagtatgtggtagttgagcgtaaatatttttttgttatagttttagtggtagaggtttaagtattacgttttatttagtgttcgtattgcggttttcgtaattttttaagtagttttgtatcgaaaatttaggtcggagattcgagtttaaattgttgaaaagttttaaggtttcggatagggttttagtaggggttatttttttttaggattcggggtttattgtgtttaagattcgttatttaagttttgttttgcgcgtacgttgtttgttttacgttttgcgttgatacgcgtcggtgttttttcgggttagttttagtttcgggttttgtggtcgttttgtcggcgattttgcggagagcgagttttagatatttagtttttagtttcgagttgttattttttcgttgtagttaagaaggaggagattaattaagggtattttagaagttaggcgttttcgttgttttttttgagtacggaggttattaattttttagggggaagagatgtagcgcgaggtaggggtgtcgtgttaagaaatttcgacgtttttggggattgaggataaaggtgcggatacgatttcggggtatttggagtttcgtgattcgcgttacggacggtatatttaggggttaatttttgttttgttttaaagaattttaagttagagtttttgttttcgtttatagtttcgggatgtcgttgttgcgtttatcgtataggtagcgttcggatcggttgtagtagatcgcgcgttgcgcgttttatcgggagatggtggagacgttgaaaagttttttttttgttattttggacgttgtgggcggtaagcgttttagtttttatttttgttgagttgaacgtttaggtatagtggaattgaaattcggttttgcgggatgtgagagttgttgaggttacgcgtaattgggtgtgatggagggcgtttgttcgtgatgtgtgtaggtttgatgtaagtaggttatcgtcgtgcgagtgtgtggatgcgatcgttcgagagattcggaggtaggtttgggatacgtttgagtgaatattttaggatatttttttggttagtatttgttttttagtgtttgtgatttagagtgggtatatgttgggagatagtaatgggtttgggtgtgtgtaaatgagtgtgatcggaagcgagtgtgagtttgatttaggtagggattatatagtattgttatatttgtttgttttttagtagaggattgaagtgcgggggtgggggtacggggtcggaatagaatgtttttgggatattttggtaaatagtagtcggaagtaaaggggtagttgtgtaaacggtttaggtaggtgatggatggtagggtaggaagggggaggtttagaggtttggatggaggttttcgtatttgtattttgtaatttattttttaggtttagtaggttatcggttttttttttatatatgtaatggatttgaagagtatttcgggatagttcggggagatggagattcggaaagtatttatggagattttatagaattttttgtgcggattaggaaatttttgtagatttttgtttatttgaggtttaggcgttgggttgttttttataatatttttttaagatgagattgtggtttttattttaaagatgagtatattgagtttttgtgaagttatttgtttatgattatataattaggaattgggttaattgtaattgaatttttgtttaataaagtttttgtttttagtttcgttttttgttttttacgagttttggttttttgtgggtaatattagttattggagttagattttttgggtttagaatttatttttaggggtattaatttttaaaattttatttgggtaggggtttgggattagagttggaagagtttttataattttggatttttttcgttaaatcgtgaaattaggggtggagtggggcgagggtttaaaattaggtcggattgagaggtgaaatttattatgacgttaaattgtttttaaattttcgtttattttaagggcgttatttgttggtgtttttattattttttattatttttattaatgattttaatgtaaatataagtgggacggttttgttggattttttaggttttggaagtatgagggtgacgtaatttaggggtaaaggattttttcgtttattggttgttgtgtattggcggaattttttcgatttatagcggcgggaataagagtagtcgttggcgttgggaggtattagagatattgtttagtttaagtgtcgtcgtcgtttttatagggttttgttggacgtcgtcgtcgtcgttgttatcgtttttgatttaagttatttttcgttaggtgagtttcgagattttggtttaggtatatgtttttttttttttttttttttattcgttatttttttatttttttttttttttttttttttttttcgttagtttttttattagatagtttttgttagttcgcgatttatattaggttcgtgttttaggttggatcggatagttttaatttttcggttcgttttttttgttcggttgcggattttagttttattttttcgtattgtatataggtttaggttagtttcgggatatttaggttttttagggatcgcgtatagagtttgaggtaagagaaatttttcgtagacggtgcgattagggacggcgtttggagtttagtagttttagggaaattggtttagaatttggaatagagcggatgggtggtaaataggtacgacgattgagggataagtagttttaaattgtaagttttagttataggttttgggagtaaagagagaaagttttgggttttaatttaagagtaaaatttggtttttgtaggggattgaggtgttagtaggcggagtttaggttgagtattaaaattgatttttttattttttagattttaattgtagagataatttttgtggatagattttattttttttattaaggtgtatgtaaaagttttagaagaggaggatagttttgggtttttttatgggattagtttttgtgataggggtttgggagtatgttttttatagagatttggttaataggtttatatgtatttgtgtggttttggggagaagggtaggattgagattttttttatttagttttttttttaggatcgtttttttagttttattagattgtgtatgttataggtttattgaattttttagaagtttattgtgttgatgaggaaataaaaaagaagagaaatataatgattagtttgaagttataaagttagagcgttagaagtaagatagaaaattaggataggagttaaggtttgtgggtttttagaatttcgaattggcgtaggtggtttattttattttttttttgtaga

SEQ ID NO: 160 - DNA, 6104 bp, Artificial Sequence
  chemically treated genomic DNA (Homo sapiens)
tttgtaagggaagaatgagataaattatttgcgttagttcgaagttttaggagtttatagattttggtttttattttggttttttgttttgtttttaacgttttggttttgtggttttagattggttattatatttttttttttttttgtttttttattagtatagtggatttttgggaggtttagtgggtttgtagtatgtatagtttgatagagttggaggagcgattttagagggagagttgagtgggggaggttttagttttatttttttttttaaagttatatagatatatataaatttgttagttaggtttttgtggaggatatgtttttaggtttttgttatagaagttgattttataaggaaatttagagttgttttttttttttggggtttttgtatatattttggtgggaggggtgggatttatttatagagattatttttgtaattggaatttgagaaataaaagaattaattttagtgtttagtttaagtttcgtttgttggtattttagttttttgtaggaattaagttttatttttaaattgggatttaagattttttttttttgtttttagagtttgtgattggggtttgtagtttagggttgtttgttttttagtcgtcgtgtttatttgttatttattcgttttgttttaggttttgaattaatttttttgggattgttgggttttagacgtcgtttttgatcgtatcgtttgcggaaagttttttttgttttaggttttgtgcgcggtttttggggagtttgagtgtttcgagattggtttaagtttgtgtgtagtgcgagagagtaagattggagttcgtagtcgagtaggaagagcgagtcgggggattgagattgttcgatttaatttagggtacgagtttggtataaatcgcggattaatagagattatttgatgaagagattaacggagagagagggagaggaggaaagggagtgagaaaatgacgaatggagggagagggagggagagatatatatttgagttaggatttcggggtttatttggcgggaggtggtttggattagaggcggtggtagcggcggcggcggcgtttagtagagttttgtggaagcggcggcgatatttgggttgggtagtgtttttgatgttttttagcgttagcgattgtttttattttcgtcgttgtgggtcgggaaagtttcgttagtgtatagtaattaatgggcggaggggttttttgtttttgggttgcgttatttttatgtttttagaatttggaggatttagtaggatcgttttatttgtatttgtattgaggttattgatggaaatggtgggggatggtgggggtattaataagtaacgtttttaaagtgagcgggaatttgagggtagtttgacgttatggtgaattttattttttagttcggtttggttttgaattttcgttttattttatttttggttttacgatttggcggaaagggtttaggattgtagggatttttttaattttgattttagatttttgtttaagtgagattttaaaggttaatgtttttaagggtgggttttgggtttaagaaatttgattttagtagttggtattatttatagagggttagggttcgtgggaaataagagacggagttgggagtaagaattttgttagataggagtttaattatagttggtttaatttttggttgtgtgattatgggtaagtaattttatagaggtttagtgtatttatttttgaaatggggattataattttattttgaaggaatattgtgagaaatagtttagcgtttgggttttagataggtagggatttataagagttttttggttcgtataggggattttgtaagatttttatggatatttttcgaatttttattttttcggattgtttcggggtattttttagatttattatatgtgtgaggagggggtcgatgatttgttgggtttgaggggtgagttgtaaggtatagatgcggaagtttttatttagatttttggatttttttttttttattttgttatttattatttgtttgagtcgtttgtatagttgtttttttgttttcggttgttgtttgttaagatgttttagagatattttatttcggtttcgtatttttattttcgtattttagttttttattaaagagtaggtaggtgtgatagtgttgtgtggtttttgtttagattaagtttatattcgttttcggttatatttatttatatatatttaaatttattattgttttttaatatgtgtttattttgaattatagatattaaaaaatagatattggttagaagagtattttgaggtgtttatttaaacgtgttttaagtttgttttcgagtttttcgggcggtcgtatttatatattcgtacgacgatgatttgtttgtattaaatttgtatatattacgaataggcgttttttattatatttaattacgcgtgattttaatagtttttatatttcgtagaatcgggttttagttttattgtgtttgagcgtttagtttagtagaggtagggattaaggcgtttgtcgtttatagcgtttagagtggtaagaaagaagttttttagcgtttttattatttttcggtggaacgcgtagcgcgcgatttgttgtagtcggttcgggcgttgtttgtgcggtgagcgtagtagcggtatttcggggttgtgggcggaggtaaggattttagtttgaggttttttgaggtagagtagaaattagtttttaggtgtgtcgttcgtggcgcgagttacggaattttaggtatttcggggtcgtgttcgtatttttgtttttagtttttagaagcgtcgaaattttttagtacgatatttttgtttcgcgttatattttttttttttagggggttggtggttttcgtgtttaaaggaggtagcgggaacgtttaatttttaagatgtttttaattgatttttttttttttaattatagcgagggaataataattcggggttggggattgggtatttaagattcgtttttcgtagggtcgtcggtagggcggttataggattcgggattggaattggttcgggaggatatcggcgcgtgttagcgtagagcgtgaaataggtaacgtgcgcgtagagtagggtttggatggcggattttgggtataatgagtttcggattttgaaggaagataatttttgttgagattttgttcggagttttggagttttttagtagtttaggttcggattttcggtttgggttttcggtgtagagttgtttgaagagttgcgaaggtcgtagtgcgggtattgagtggggcgtagtgtttgggtttttgttattggggttgtagtagaagggtatttgcgtttagttattatatattttagcggaaatgatttttttttaagattagaggtttttaatataagaattttttgaaatcgtttgtaagtgtgtgtgtttgtgatgtgtgtttttttaaagagagagtttatagttttcgttcgtgttacggtgatcgtaaaatgaaagttagtagacgtagattttgtggttatgttattttgaggggtcggaattttatttttgattgtggtgtgtgtttttagtttttagaatagatacgtattttttattattaaatttttggtagttataaattaaaggttggtgtcgtggggcgttaattagagtttgcgtttagagggcgttagtgtagtttcgagtagttttaagattgattgtaaaagtttgtttttttaggataggagggacggttattaatttattttttaagtattttttgagtttgtaggaattgtttggttttttgttgggggtcgaaagtttttttcgtttttgtttgaaaattattttttttagtaattagtattatgttaggtattttagtagacgattcgttaaagttaaatgaatgaaaatttattttggtaaatttattagttttataaggtagtttgtagaaaattcggatttagttagagcggtatttcgttttgtttttcgaaatttataaattatttagttagattttttttattttatttgttatagtaagtcggtttttaggtagaagtttttaggaatgaggtagggaagtaaggatttcgtttagggttttttttaaagattgagattttttggtgtaaaatgcgaagttattttttgagtttatttcggatttattgagcgagcgaaggaagggtagagtttttcgtgagcggattatttagattttatttcgttatttttggaatttttttgagttttagtattaaatagagtatggtttaacggaagtcgttaaggaaaatgttgattttaaaaaaatagtcgtttgattatttgatttttgatttttattgttttattttttaatttaaaaatttggaaattagggttagttttgaaataatttgattttggaaaaaaatatttttataatattttaataaagtttaattgtaatgtttgtttttattcgtttagattagatttttgtattttttgtttaagaaataaaaataaatatgaagtttggttgaaaatttttacgtgaatttttacgtgattaaaaaagttatatttgaaggtttgagtttagagtttaagttaaatttattattgttttataatttttttataatatggatttaattataaaattttagtagtagtaatagtattattagtaatagtaatataatagtttataatatatatattttttttagtttggtagaaacgtggagttattaaattaattggaaaaaattttaattgaaaatcgattgtattgtttaaagaagggtagaaattaaagttttttattatcgtgtttattgaagaatatgttaagagaagtagttgtttttgaattatttttttaagatatttttagattgtagtaaagttgtttttggggaagggagtatagaaatggttgttaaagagatagcgagatttataataattaagatatagaaatagtttaagtgtttattgatgaatgaattattaaagaaaatgtggtgtgtgtttattatatatatataatggaatattagttagtagtattatttagaagaaggaaatattgttatttgtgttaatatggttgaatttggggaatattatgatatataaaataagtgaggtatagaaagatacgtaatatatgattttatttatatgtagaattttaaaaaataagtcgaatttagtaataaaggttagaatggtgattatttggggttgcggttgggggtaaaagagaaatattagttaaaggatataattttttagttataagatgagtaagttttggagatttaatatatagtttggtgattatagttaatatatgtttgaaatttgtaaagagagtagattttaagagttttaagcgtatatatatatatatatatataggaaattatgtgaggtaatgatatgttaattaatttgattgttgtaattattttataaagtatatatgtattaaaatattatattgtatattttaaaaataaaaatttttaatatggaaataaaagtgaaaaaaaaaaagagtgagagatagttgaaattttttagtgggaattttgttgaagattttagaagaggggtatttgtataaatattgaagaggatattaatgttttattaataatttagatatagaattatttaaaagatgttgtatgtgtagtaagtatgaaaagttatataaattatattaaattgaaataaagaaaagatattataaatattataattattattaattaagttttattcgtgtgttaggtattgtgtgtatattattttttttatttttaatagtttaataagatagatatttttatttttgttgtatatgtaagggaatagtaagagtatttggtttgaattaattatattttttaggttttttttgaggatttgaaatatagtttatttttttgttatgttaggtaagaggtttggttttttggatttaggtattgatttagaggaagatatgggtatgtttgtttgttttagggtta

SEQ ID NO: 161 - DNA, 5976 bp, Artificial Sequence
  chemically treated genomic DNA (Homo sapiens)
agaggggtattttttattttaatttgaattttatgattgtattttttgttaggagatgaaagggataagattgtttgaaggattaatttttagtttttaggtaggttagtggttaaaatatttaggaagtgaaagtttgttttttgttataaggaaatttggagtttgtgattttattatgcggggtttgttatttgttaggtgatagggttttttatttatttgcggtgatttgaagggtaaggtttttggttaaatattttttttttttagtgatgtttgaaattttattgttagcgttggattttagtaagattttagagaaagtttaatttttggagtttgggttttttttagttgagatgttaggaaagtaatgggttttattatttgtacggataggtttgtgtatagttttaggggatttagggattttattagagtttatttatagatattaggttaaaagttttggatagtatttataatttttttgaaagaagaaaagtttttttttagagttttttttaaagtgtaaatggttttgggaggttcgaaatgatgagttggtcggtatgaaagaattttttttagtagatgtaagagataatttgaggagttttagtggcgggggtgggggaaggagagtttgggggaggggaggttttaggtagtttataattttttttagaattggaaagggaatgtattgggttaagagggttaattatttatttttgtagagtgtttataagaattttatgaattaagtgttattaatatttttattttatagatgaggaaattaagatggtggagataaaatgatttatgttttttaattaatggtagagttagaagtgaatttaggttggagtgaagtggttttagtgtttaaatgatttttttattttagtttttagagtagttgggattataggtatgtattgttatgtttagttaatttaaaataatatttgttggggagatggggttttattatgttgtttagattggttttaaatttttgggtttaagtaatttttttattttttaattagttttttaaagtgttgcgattatagttgtgagttattaggtttgtttaggtatttttgtttgatataagagaaaatagagggtaggtatagtggtttatatttgtaattttagtattttgggaggttgaggtaggtggattatttgaggttaggagtttgagattagtttggttaatatggcgaaatttcgtttttattaaaatataaaaattagttagatatggtgacgtgtgtttgtaattatagttatttaggaggttgaggtataagaattttttgaatttgggaggtagagagtgtagtgagtcgagatcgcgttattgtattttagtcggggtaatagagtaagattttgttattaaataaataaataggaaatagagaagtaatttagtgtgttgcgaaagttatatagtatttgttttttataaggagtttttttgtgttttcgttttattttggatatttgatttattgtttttggagtttggagaaggatttgtcgagaagtttgaagaatgtattaggtttgatttgattttgttgtttttaattgttttttaaaattttttttattgaattattagagtgtaatggaagagtcgatgagagtcgttgtagagttacgaggttaaggtttgttgggtagaagaaagtaaagttttaaaggtttttagggtttagcgatggtataaaatatgtatttttatataattgagaggaaaaaaataagtagatagtatagttttatgggggaaacgtttttttttgtatttttattattttgtttaaggtacgattttagtgggaaaggaaatatcggagttttttttttttgagttttttggtgggttaagagtagagggagttaaaatacgatatttaaaagatttgattggaaatttattaaaattgaggggataggttgttggggggggcggtgttgggttgtttagaaatcgtttgtatttgagaaattatttgatggatttagaggtatttttagttttgggtgaaatattttaaatatggttttttttaggaggaagcgaaataggggttgggttttttgaaagagtaatttttattttaaatatttattgagtagttgttatgatgagttaagaattttgtttagcgattgtttttgtattagtttatgttaatttatttatataaaggagaatattgatttttttaaggttatagggttagtgagtggttgattttatttaatgttgtgtagttttaattatgtttgaaggataaagggaaaggaggtgtttttgtcggggtagataagttatttagacgtggttggttatagggagttagatagggaagttgtttaatttaatatttgtttgtttattttgtttttgttttttgatggaggacggcgggtgttggagggttattggtttaggatttgagatttttggtttttatttattttatttttgattttaaaattattttattggggatagaattttttggagaaggtgatggtggttatggtgtggttgtggtattaaaagttttattttgggggttagaagattttgggttttggtttttggttttgatattgatttgtttatgtgatattgaataagttatttgtaaattataggtttgggtgaattttaaaggttttttttaggttaatattaaaaaatagattgaaaattgtagttttagttggaagattgggattatatgagatgaagttgattgttagaagaaaggttttggaattagagaggttggttttagttttgcgttattttttattggttttaatttttttaagttttagttgtttatttattatatgggaataataatatagtttttgggttgttttgaaatgagtttaaatgagttggttagtggttgggtacggtggtttatgtttgtaattttagtattttgggaggttgaggtaggtggattatttgaggataggagtttaagattagtttggttaatatgatgaaattttgtttttattaaaaatataaaaattagttagtcgtggtggcgtatgtttgtaattttagttatttaggaggttgatagaggagaatcgtttgaatttaagaggcgaaggttgtagtgagttaagaatatattattgtattttagtttgggcgatagagtaggatttcgttttaaaaaaaaaagagttggttagtgttaaatgtttagtatagagattggtatagtaatttttaatgtttagtatttattgttattattttttttttttttttttttttgagatagagttttgttttgtcgtttaggttggagtatagtggcgcgatttcggtttattgtaagttttattttttaggtttatgttatttttttgttttagtttttcgagtagttgggattataggcgtttattattacgtttggttaattttttgtatttttagtagagacggggttttattgcgttagttaggatggttttaattttttgatttcgtgatttgttcgtttcggttttttaaagtgttgggattataggcgtgagttattatgtttggttttattgttattatttttattttttatttttgtatagagtatttatggtttaagaaatatttgttattttaattgtatgggagttttataatagtatagggagatatttttgattattatttttattaggagggtggagaaattgaggttttgggaggtggttttgatttagggaattaatttgttgatttattaatttatgaagttttatagttaaaaaagattagattaaaaaatgagaatttagtaaaggggttgaggtaggaggatcgtttgagtttagaaatttgagattagtttcggtaatatagtgagattttttttttagaaaaattttttaaaaaattaggtcgttcgaggtagagtgtagtggtttacgtttgtaatttaatattttaggaggttgaagagggtggattatttgaggttaggagttttagattagtttggttaatatggtgaaatttcgtttgtattaaaaatataaaattagtcggtgtggtggtatacgtttgtagttttagttatttaataggttgagataggagagttttttgaattcggtaggcggaggttgtagtgagtcgagatcgtgttattgtattttagtttgggtaagatagagcgagatttcgttttaaaaaatataaataaaataaataaataaaaaattaggttgttagtttagtggtttatggtttatatttgaaattttagtattttgggaggttaaggtaggaggatcgttttagtttaggagttcgagattaggttgggtaatatagggagatatagcgtttttattgtttttgttcgtttcgatttgtttttttataaaaaggtaaaagaaaaaaaaattagtttggcgtggtggtgtgtatttgtatttttagttattagagaggttggggttagaggatcgtttgagtttaggagttcgaggttgtagtgagttgtgatcgtattattgtattttagtttgggtgaaagagtgagattttatttttaaaacgaataaataaaaaattttaaaaaataaaagaatttagttaagtgtaaaagttttttttgattttaggttttagtgagttatcggcggggttgggattcgaatttagtggaattagaatcgtgtaggttttataatttatttagattttagtaattttaggttagagggttatcgcgtttatgcgaggtcgggtgggcgggtcgttagtttcgttttggggaggggttcgcgttgttgattggttgtggtcggtaggtgaatttttagttaattagcggtacggggggcggtgttttcggggtttatttggttgtagttacgtatttttttttagtggcgtcggaattgtaaagtatttgtgagtttgcggaagttagtttagattttagttcgttttagttcggttcgattcgatcgtattcggcgtttgttttcgttcggcgttttcggttagttatgggtttttggagtcgtagtttttcggcgttgttgttgttgttgtaggtatttcggattttttgatttgcgagggacgtattcgggtcgtaagtttcgcgttttagttttgcgtttttttttttttcgtcgttatcgtttttttttttttaagaaagttcgggttttgaggagcggagcggtttggaagtttcgcgcgtttcggattttttagtgatgggagtggggggtgggtggtgaggggcgagcgcggtttttttgttttttttagcgtagatcgaggcgggggcgtttggtcgcggagttcgcggggtgggttcgcgcgggcggtgggggcgtgaagcggggtgtagggggtggggtgtggagaaggggtgttttggtgtaagtcgagggggagttaggagtcgtggggacgattttcgagggaaggagaggggtattcgtagaaataaaggtatttgttatgttaagaaaggtcgtaaataggagtgagggtttcggggataagaaagtgaggtcggaggaggtgggagcgtttttcgttttgaggagtggtgtattttcggtttaaggaaagtggggtattggagaataaagatatttttaataaaatgagaaaggagattgaaagggaacggtgggttaggttttgagggggtgattcggcggttttttttcgggagtttttgggggttcggcggtcgtaggtttcggggtgggggagggtgacgtcgttgttcgttcgtttcggggttgcgggttggggtttttttttaatttcgacgtcgggagcgagggaggggcggcgttgttggtttcggtgagtaggagggaatttttcgagttattcggttttatttattttttttttattttagg

SEQ ID NO: 162 - DNA, 5976 bp, Artificial Sequence
  chemically treated genomic DNA (Homo sapiens)
tttggggtgggggaaaggtagatggaatcgggtgattcggagggtttttttttgtttatcgaaattaatagcgtcgtttttttttcgttttcggcgtcgggattgggggaggattttagttcgtagtttcgggacgggcgggtagcgacgttatttttttttatttcgaaatttacggtcgtcgagtttttaggaattttcgggagggggtcgtcgagttatttttttaagatttagtttatcgtttttttttagtttttttttttattttattggagatgtttttattttttagtattttattttttttagatcgggaatgtattattttttagagcgaggggcgtttttatttttttcgattttatttttttattttcgggatttttatttttatttacgattttttttggtatggtaggtgtttttatttttacggatgtttttttttttttttcgaagatcgtttttacgatttttggttttttttcgatttgtattagggtattttttttttatattttattttttatatttcgttttacgtttttatcgttcgcgcgagtttatttcgcggatttcgcggttagacgttttcgtttcggtttgcgttggagggggtaggaaagtcgcgttcgttttttattatttattttttatttttattattggggggttcggagcgcgcgaggtttttaggtcgtttcgttttttaggattcgaatttttttggaagaagggaagcggtgacgacgggagaggaaggggcgtagggttggggcgcggagtttgcggttcgaatgcgtttttcgtaagttaggggattcggggtatttgtagtagtagtagtagcgtcgagaggttgcggttttaagggtttatggttggtcggggacgtcgagcgagggtaggcgtcgggtgcggtcgggtcgggtcgggttggagcgggttggagtttgaattgattttcgtaagtttataggtgttttgtagtttcgacgttattgagagggggtgcgtggttgtagttaggtgagtttcggaggtatcgtttttcgtatcgttgattggttgagggtttatttgtcggttatagttaattagtagcgcggatttttttttagggcggagttgacggttcgtttattcggtttcgtatagacgcggtgattttttagtttggagttgttagggtttaggtgggttatgggatttgtacggttttgattttattgggttcgaattttagtttcgtcggtggtttattaagatttgggattagaaagggtttttatatttggttgagtttttttgttttttgggattttttgtttgttcgttttggagatggggttttatttttttatttaagttggagtgtagtggtgcgattatagtttattgtagtttcgaatttttgggtttaagcggttttttggttttagtttttttagtagttgggagtataggtgtatattattacgttaggttaattttttttttttttgtttttttgtagagagataagtcggggcggataggggtagtgggggcgttgtgtttttttgtattgtttagtttggtttcgaatttttgggttgaagcgatttttttgttttggttttttaaagtgttaggattttaggtgtgagttatgagttattgagttagtagtttaattttttgtttgtttgttttgtttgtattttttgagacggagtttcgttttgttttgtttaggttggagtgtagtggtacgatttcggtttattgtaattttcgtttgtcgggtttaagagatttttttgttttagtttattgagtagttgggattataggcgtgtgttattatatcggttaattttgtatttttagtatagacggggttttattatgttggttaggttggtttggaatttttgattttaggtgatttattttttttagttttttgaagtgttggattataggcgtgagttattgtattttgtttcgagcggtttaattttttaaaaaatttttttagagaggggattttattatgttgtcgaggttgattttaaatttttgaatttaggcgatttttttgttttagtttttttattgagtttttattttttaatttagttttttttaattgtagagttttatgggttagtgagttagtaaattgattttttaggttaggattattttttaaagttttagtttttttatttttttaatgggaataatgattagaaatgtttttttatgttgttgtgggatttttatataattaaaatgataaatgttttttgagttataaatgttttgtatagaagtgaggggtaaaaatagtaataatagggttaggtatggtggtttacgtttgtaattttagtattttgggaggtcgaggcgggtagattacgaggttaggagattgagattattttggttaacgtagtgaaatttcgtttttattaaaaatataaaaaattagttaggcgtggtggtgggcgtttgtagttttagttattcgggaggttgaggtaggagaatggtatgaatttgggaggtggagtttgtagtgagtcgagatcgcgttattgtattttagtttgggcgatagagtaagattttgttttaaaaaaaaaaaaaaaaaaaaaatagtaataataggtgttggatattgaagattattgtgttagtttttgtgttaagtatttgatattgattagtttttttttttttgagacggagttttgttttgtcgtttaggttggagtgtaatggtgtgtttttggtttattgtaattttcgttttttgggtttaagcggtttttttttattagttttttgagtagttgggattataggtatgcgttattacgattggttaatttttgtatttttagtagagatagggttttattatgttggttaggttggttttgaatttttgtttttagatgatttatttgttttagttttttaaagtgttgggattataggtatgagttatcgtgtttagttattgattagtttatttaagtttattttaaaataatttaagagttgtattattatttttatatgatagatgggtaattgaagtttagagagattgaggttaatgagaggtggcgtaggattggaattaatttttttgattttagggttttttttttaataattagttttattttatgtggttttagttttttagttggagttgtagtttttagtttgttttttgatgttgatttggaagagatttttagagtttatttaaatttatgatttgtaaataatttgtttaatgttatataggtaggttaatgttaaagttaaagattaaaatttaggattttttgatttttagagtggggtttttaatgttatagttatattatggttattattattttttttagagaattttgtttttagtgaaataattttaggattaaaaatagaatagataggggttaaaggttttaggttttgggttagtggttttttagtattcgtcgttttttattaaaagataaaaatagaatagataggtaaatgttaggttagataatttttttgtttgattttttgtggttagttacgtttgggtggtttgtttatttcgataagggtattttttttttttttattttttaagtatggttagaattatatagtattaagtggagttagttatttattagttttgtgattttggggaagttagtgtttttttttgtataagtgaattggtatgagttaatataaaaataatcgttaagtagagtttttggtttattatagtaattgtttaataaatatttggagtaggggttatttttttaaaaggtttagtttttatttcgtttttttttggggaaagttatgtttggaatattttatttagagttaaaggtgtttttgagtttattaagtaattttttaaatgtagacgatttttgggtagtttagtatcgttttttttaataatttgtttttttaattttaatgagtttttaattaggttttttggatgtcgtattttggttttttttgtttttaatttattaggaggtttagagggagaaggtttcggtatttttttttttattaggatcgtgttttgaataagataatggaaatatagaaagaggcgttttttttatggggttgtattgtttgtttatttttttttttttagttatgtaaaaatatatattttatattatcgttgggttttgggagtttttagggttttatttttttttatttagtaagttttggtttcgtaattttgtagcgatttttatcgatttttttattatattttgataatttaataaaaaggattttagaaaataattaggggtagtaaagttaggttaggtttgatgtattttttagatttttcggtaagtttttttttaagttttaaagatagtagattaggtgtttagggtgaggcgggaatatagaggggttttttgtggaagataggtgttgtgtgattttcgtaatatattgaattgtttttttgttttttatttatttatttagtgataaggttttgttttgttgtttcggttggagtgtaatggcgcgatttcggtttattgtattttttgttttttaggtttaagagatttttgtgttttagttttttgagtagttgtgattatagatatacgttattatgtttggttaatttttgtattttagtagagacgggatttcgttatgttggttaggttggttttaaatttttgattttaagtgatttatttattttagttttttaaagtgttgggattataggtgtgagttattgtgtttgttttttgtttttttttgtattaaatagggatatttaagtaggtttggtggtttataattgtaatcgtagtattttgggaggttagttgggaggtgagaagattatttgagtttaggagtttgagattagtttgggtaatatggtgaaattttatttttttaataaatattattttgaattagttggatatggtagtgtatgtttgtagttttagttattttggaggttgaggtaggaggattatttgagtattggagttattttattttagtttggatttatttttggttttgttattagttgagaagtataagttattttatttttattattttggtttttttatttgtaaaatgggaatgttgatagtatttaatttataaggtttttgtaaatattttgtaaaggtgagtgattagtttttttggtttaatatattttttttttagttttaggaaaaattgtgagttgtttggagtttttttttttttaggtttttttttttttattttcgttattaaagttttttaggttattttttgtatttattggagaaaatttttttatgtcggttagtttattatttcgaattttttagggttatttgtattttaaagagggttttagagaaagatttttttttttttaaaggagttgtaaatgttgtttagggtttttaatttggtgtttgtggatgggttttggtggggtttttgaattttttgagattgtatataaatttgttcgtgtaggtgataaggtttattgtttttttaatattttaattggggaaaatttaaattttaggagttgagttttttttgagattttgttgagatttagcgttaatagtggaattttaggtattattggggaaaagaaatgtttggttagaggttttgttttttagattatcgtagatagataagagattttgttatttggtagataatagatttcgtatgatgggattatagattttaggtttttttatggtagaggatagatttttattttttgggtgttttggttattggtttgtttggaggttaaagattaattttttaggtagttttgttttttttattttttggtaaggggtgtagttatagggtttagattggggtgggaggtgttttttt

SEQ ID NO: 163 - DNA, 2501 bp, Artificial Sequence
  chemically treated genomic DNA (Homo sapiens)
tagaagtttttttttagagtgtgtttgggtatatatttaagtgtatggttgtaaatttttttttttaaagtattgaatagtattagatatttagtaggtatttaagaaatattgaatgtcgtggtggtggtgagttagaagttataaaaaaaatttttttttaaaaataataataaaaagaattattttattgtgaagtttagtattataaaaatttaaataatttattataagtttttattaaaaaaaattttttttttaaagtaaatagatagataatgtttagtttatttgaaatgtttgaaagtagaggggttttaaggtagtgggagaaggtgtttgttttttgttggatatttgataattagttttttggatggtttggatgtataggagcgaaggtgtagatagtagtggggtttagagtggggttttgaggttgtgtcgtggtttttttggggtttagttataattttggtttgattttagggcgaggtaggttaagggggtttgttattgtgtttttttatttttatttgggtttttatttttatagtagaggagaaagaagtttgtttttttcgaggttagttgcgttagaggaagaagattgggtatgtttgggtagagatttttagattttgagtagtttgagatgttagtaattgtagttgttttaagtttgggttttgttttttagtgggatttttgtttagatgaataatttattttttgtaattttttaaaagtaaaattgtaaatgttttaggtatagaaaggaggtaaaggtgaagtttaggggaggttaggggtgtgaggtagatgggagcggatagatatattatttatttttgtgtttgttagaagaattagtagatatttttagaattgttttttatttatgttatttttataaattatttgtaaatgagggttatttggtatttttgttattttggagttatagaaataaaggatgataagtagagagtttcgggtaggaggtaaaagttttgtgttttaattatagttatttttttgttgtatgatttgagttaggttattagatttttttgagttttagtttttttagtagtgtatacgggttatgtggggagtatttaggagatagataatttattcgttaaatttttttttttttggttaataaagttgttgtaattatagggattttttttgtttaggtgagtgtagggtgtagggagattggtttaatgtttaatttttttgtttttttggagattaggttgtttttttttggtagtttttttaattttttttttttcggaagtatgtgataattaataattttgtatatttaagtttagtggattttaatttttttatttgtgaaataaacgggattgaaaaattattttggttttaagatgttttgttggggtgtttaggtgttttaggtgtttttgggagaggtgatttagtgagggattagtgggaatagaggtgatattgtggggtttttttggaaattgtagagaggtgtatcgtttttataatttatgaatttttatgtattaatgttatttttttgatttttttagttgtattgggtaaatttttgtttgttagagtgggttagcggtgagttagaaagggggtttattttaatagtgttgtgtttttttggagagtgttaatttattttttaagtaaaaaaagttagatttgtggtttatttcgtggggaaatgtgtttagcgtattaacgtaggcgagggattgggggaggagggaagtgtttttttgtagtacgcgaggtttcgggatcggttggtttgttggaattcggttaggtttagttggttcggcgttgggtagttaggagtttgggtttcggggagggcggtttcgggcggcgcggtgggtcgagcgcgggtttcgtttttttgaggcgggttcgggcggggcggttgtatattagggtcgcgttgagttgcgttagttgaggtgtgagtagttgtcgaagttagttttttgtggagtcggagttgggcgcggattcgtcgaggtatcgaggtatttagaggaggtgagagagcggcggtagataataggggatttcgggtcggcggtttagagtcgagttaagcgtgttcgcgtgtgtttttgcgtgttcgcgaggatgcgtgttcgcgggtgtgtgttgcgtttataggtgtttttgcggtaggtgaatgacgggcgtgggtcggtgcgcgttcggtttgcgtatacggtgtttttaagtgcgcgggtgacgagagtcgggatgtgtcggagatttcggggcggagagcgggattataagtataggaatttttggttacgtttttcgtttttggaaatttagttggggcgagggagggcgtggacgggatcgttttgggagttcgtttttggttgcggttggttttaggttttaggcgtagtttgttcgcggcgtggggatgaagttcgtgtttttggaggggtttaggaagg

SEQ ID NO: 164 - DNA, 2501 bp, Artificial Sequence
  chemically treated genomic DNA (Homo sapiens)
tttttttgggtttttttagggatacggattttatttttacgtcgcgagtaaattgcgtttggggtttggagttaatcgtagttaaaggcgagtttttagaacggtttcgtttacgttttttttcgttttagttgggtttttaggggcggggagcgtgattagggatttttgtatttgtaatttcgtttttcgtttcggggttttcggtatatttcgattttcgttattcgcgtatttagagatatcgtgtgcgtaagtcgagcgcgtatcgatttacgttcgttatttatttgtcgtagaaatatttgtgaacgtagtatatattcgcgaatacgtattttcgcggatacgtagggatatacgcgggtacgtttggttcggttttgggtcgtcggttcggggttttttgttgtttgtcgtcgtttttttattttttttgagtgtttcggtgtttcggcgaattcgcgtttagtttcggttttataaggaattgatttcggtagttgtttatattttagttggcgtagtttagcgcggttttgatatataatcgtttcgttcgggttcgttttaaggaggcgggattcgcgttcggtttatcgcgtcgttcgggatcgtttttttcggggtttaggtttttggttgtttagcgtcgagttagttgagtttggtcgagttttagtaggttagtcggtttcggaatttcgcgtgttgtaggagggtatttttttttttttttagtttttcgtttgcgttggtgcgttggatatatttttttacgaagtgagttataaatttggttttttttatttggagaatgagttggtattttttaggaggatatagtattgttagaatgagttttttttttggtttatcgttgatttattttggtaggtaaggatttatttaatgtagttgaaaagattaggaggatgatattaatatataaaaatttataaattataaaaacgatgtatttttttgtaatttttagaaaagttttataatattatttttatttttattgattttttattaggttattttttttagaagtatttggagtatttagatattttaataaagtattttgaggttagaatgattttttagtttcgtttattttatagatgaggaaattgaggtttattgaatttaagtatataaagttgttgattgttatatgttttcgggaaggagggaattggagagattattaaaaaagggtaatttgatttttagggaaatagaagaattggatattgaattaatttttttatattttatatttatttgaatagaagaaatttttgtggttgtagtagttttgttggttaggaaggggaggatttgacgagtgagttgtttgttttttgaatattttttatatagttcgtatatattgttggggaaattggggtttagagaagtttggtgatttaatttagattatgtagtaaagaaatgattatagttggaatataggatttttgttttttgttcggggttttttgtttgttattttttatttttgtggttttaaaatgataaaaatgttaaataatttttatttgtagatggtttatggagatgatataaataaaggataattttggaagtgtttattggtttttttgatagatatagaaatgagtgatgtgtttattcgtttttatttattttatatttttgattttttttggattttatttttgttttttttttgtgtttgaaatatttgtagttttgtttttaaaaaattgtagaggatggattgtttatttgaatagaaattttattaaaaaatagaatttaggtttggagtagttataattattgatattttaggttgtttagagtttggaaatttttgtttagatatgtttagttttttttttttaacgtagttgatttcggggaggataggttttttttttttttgttgtggggatgggagtttaggtaggggtgggaggatatagtagtagatttttttggtttgtttcgttttggagttaggttaggattgtggttaaattttagaaaggttacggtatagttttaggattttattttaagttttattgttgtttgtattttcgtttttatatatttaaattatttaaagggttggttgttaaatgtttagtagaggataggtatttttttttattgttttgaagtttttttgtttttaggtattttaaatagattagatattgtttgtttgtttattttggggagaaaattttttttaataaaggtttgtaatgaattatttaaatttttgtggtattgagttttataatgaaataattttttttgttgttgtttttgggaaagaattttttttataatttttagtttattattattacgatatttaatattttttaagtatttattaagtgtttagtattatttagtgttttaaaaaaaaaagtttgtaattatgtatttgaatgtgtatttagatatattttaagggaggatttttg

SEQ ID NO: 165 - DNA, 3486 bp, Artificial Sequence
  chemically treated genomic DNA (Homo sapiens)
aattaaagaggatgagattttttgtttgattttaggtgaatttttttttgttagttaggtaggaagttttgatttgaaaattagttttgggtattgttttttttattgttttttgggtattaatttttgttttttaattttagttgaattagtggatggtgatattataggtttaagatagttgtatttaaatattagtgattataggttatattaaggaaatatttgtaggtaatttagggtttgggaaggagttatttttagttatttgtaagatagtaggatttgtagattatagtataattaaatttagataaaattttgaattagtgagaattattaggaaggaaaggaatagaaaatgaattaatttgagtgttaggagatttgtatttagttttgatttcggtattaatcgaatgtatgtttttggataggaaatttttttgagtttcgatttttttcgtggtaaaaaggagagggttaaattatagggtttcgagggttttttttagttgttatattttggagcgtatgagatgaggtaggtatataaagtggataagatgtggttaagaaaataagttatatattaagtttatttgtagtataggtgtttaagaaaattttgttgttgtgtaatattagaacggaaggttggtttttagtaaaatgtattaattttggtttaaattaagatgatgggtatcgggtatgggggtggggaggtagttgaagatttattgagttttgttttagggtagttttgtttatcgttttattttattttttattacggtgtttaagtttatattgagagagaaatttttagttgtaaaagggagaagagaaacgttggaatattagtatcggacgttaggatatggttgtggtgttttaaaaattattttattatttggagtttgatttcgaggggagtatttttattttttagttttttgaaagtatttattagtatttgaatattgttttgagtttgttggagtagtgaaatttggtgagagagaagggtggaggaaggaaggagttgttgtatttggcggttggatttaggtagaggaaattgttataatttcgggaaagaatagaaaagtagaaagggacgagtttttatacgtagttaatgtttatggttttaattgtgtttgggaaggaagattttgggttaggggtgtattttcgttttttaaaattaaacgtgtttgagatagttataaagtttattaagggatttgagagattagagttttttgttttttttttttaattttgagttttttttttatttttattgagggagagtttgagtttatgataagtgtcgcgtttatttttggttaatttttaaaagaaagacgttcgttttggttttttttttaggtttttagtttttttagggatggtagaaatttttgggttaaggttgagcgaattattgtttattgtttttattagtttttagtaaaggtacgtcggcgggggggcgtttagtttttttagtaaacgtttcgcggtttttttcgtagattacgaggtgggggtcgttggggagggtcgagttgggggtagttcgttatttcggtttttagcgagttgtcggcgattttcgcggttttttggtttaggtttcggtttttcgggcgaggagcgggagggaggtcggggtttaggcgtcgcggcgaattcgttaacgtagcgtcgggtttcgaattttaggtttcgttttaggttttcggtcgtttggttagtttgtttgttttaattttaattttttcgaggttagttagagtaggtttgttggtagtagtatttttttagtagttacgcgattagttaatttttcggcggcgttcggggaggcggcgcgttcgggaacgaggggaggtggcggaatcgcgtcggggttattttaaggtcgcgttcgttagtttcggcggggcggttttcgtcgtcgtaattaatggatttttttttttgtttaaatagattcgtcgtgttaattattttttttttcgttagttttttttttatcgttatattgggttattaaaaaaagggggttcgttttttcggggtgttttttttttttttttttgttttcgtttgtttacggttttgcgatttcgacgtcggtaaggtttggagagcggttgggttcgcgggattcgcgggtttgtattcgtttagattcggacgggttttgttatttttttcgtttgtttggttttttttttttttcgttttttcgttcgttagtttatttgattagcggagattcggcggtcgggtcggggttttttcgtagtttttgcgcgtttttagagttcgggtcgtggttcgtcggggtttgtgttttttggtttcgagggtagtcgttgggttttcgagaggggttcgggttgcgtaggggcgttttgttttgttcggttttgtttttttgagagtgcgagagaggcggtcgtgtagattcgggagaaagatgttaaacgtgcgagtgtttaacgggagttttagtttggagcggatggacgttaggtaggcggagtattttaagttttcggtttgtaggaattttttcggttcggtggattacgaagagttaattcgggatttggagaagtattgtagagatatggaagaggcgagttagcgtaagtggaatttcgatttttagaattataaatttttagagggtaagtacgagtggtaagaggtggagaagggtagtttgttcgagttttattatagattttcgcggttttttaaaggtgtttgtaaggtgtcggcgtaggagagttaggatgttagcgggagtcgttcggcggcgtttttaattggggtttcggttaattttgaggatacgtatttggtggatttaaagattgattcgtcggatagttagacggggttagcggagtaatgcgtaggaataaggaagcgatttgtaatcgacggtaatgatttttttttaattatagaatgtgtttggggtttcgttttgtttgttggagggtgttaattttagtttgtttttcggcgtattttgatttagttttgggagagttaattttattggttttaggtgtttagtgttatttggtttattgtttgtttgtttgtgatttttaagttagaaattggagatggtaagattcgataatttttttaatttaatatatcgcggttttttttattagtaatttttaggtatgtgataaagttgggatgtttattaacggttcgttttttggttagggaaagagttttggggcggagaatgtattttttgttttttgaaaataattttattttgtgtttttaaaagttattggggatgacggatttaggattgtgggtggaggtagtgggttttttattttttgattatggggttaatttttgttagttattgttttttttaataaagattgtgtgttttttttaaaaattttttttgcgtttaga

SEQ ID NO: 166 - DNA, 3486 bp, Artificial Sequence
  chemically treated genomic DNA (Homo sapiens)
tttaagcgtaggggaaatttttaaaaagaatatataatttttattagaaaaaataatggttggtagaagttggttttatagttaggggatgaaaaatttattatttttatttataattttggattcgttatttttagtggtttttaagggtataaaatgaggttgtttttaaaaaatagaaagtgtatttttcgttttagagttttttttttagttaggaggcggatcgttgataaatattttaattttgttatatatttaggagttgttagtgagagggatcgcgatgtattaagttagggaaattatcggattttattatttttagtttttgatttaaaagttataaatagataagtagtgggttaggtagtattgaatatttaagattaataaagttagtttttttaaagttaaattagaatacgtcgaaaagtaagttaaggttaatattttttagtaggtaaagcggggttttaaatatattttatggttgggaaagggttattatcgtcggttgtaggtcgtttttttatttttgcgtattgtttcgttaatttcgtttggttgttcgacggattagtttttgggtttattaaatgcgtgtttttagagttagtcggagttttaattaaaggcgtcgtcgggcggttttcgttgatattttggtttttttgcgtcggtattttgtaggtatttttggggggtcgcgggggtttgtagtagaattcgggtaagttgtttttttttattttttgttattcgtatttgttttttaggggtttgtgattttgaaaatcgaaattttatttgcgttggttcgttttttttatgtttttgtagtgtttttttaagtttcgggttaatttttcgtggtttatcgggtcgaagaggtttttgtaggtcgagggtttggggtgtttcgtttgtttggcgtttattcgttttaggttagggttttcgttagatattcgtacgtttgatatttttttttcgggtttgtacgatcgtttttttcgtatttttaaaaaaataaaatcgaataaaataaagcgtttttacgtagttcgaatttttttcggaagtttagcgattgttttcggagttaaaagatatagatttcgacgagttacggttcgagttttaggagcgcgtaggggttgcggggaagtttcggttcggtcgtcgagttttcgttgattaaatggattggcgagcgggagggcggagaggagaggggattaggtaagcggagagggtggtaaagttcgttcgagtttgggcgggtgtaagttcgcgggtttcgcgaatttagtcgttttttaaattttgtcggcgtcggagtcgtagagtcgtgagtaagcggggataggggagggggagaaaaatatttcgaaaagacgagttttttttttttagtggtttaatatggcggtggaagggaggttgacgaagaagaaaatgattgatacggcgagtttatttaaatagaggaggagatttattggttgcggcggcgggagtcgtttcgtcgaggttggcgagcgcggttttaaggtggtttcggcgcggtttcgttattttttttcgttttcgagcgcgtcgttttttcgagcgtcgtcgggagattggttggtcgcgtgattgttggaggggtattgttgttaataaatttgttttggttggtttcggagaaattaaaattaagataaataaattagttaaacggtcgggaatttggggcggggtttgaggttcggggttcggcgttgcgttggcgggttcgtcgcggcgtttaagtttcgatttttttttcgtttttcgttcgggaagtcgggatttggattagaggatcgcgaaggtcgtcggtagttcgttaggagtcggggtggcgagttgtttttagttcggttttttttagcggtttttatttcgtggtttgcgggggaggtcgcggagcgtttgttgggggggttgggcgttttttcgtcggcgtgtttttgttgggggttggtggaggtagtgggtaatggttcgtttagttttaatttagaagtttttgttatttttggggaggttgggggtttagggaagaagttaaagcgaacgttttttttttagaaattagttaggagtagacgcggtatttattatgaatttaagtttttttttaatgaaaataagaaaggaatttaagattaaaaaaaaaaaataaaaaattttagttttttaagttttttaataaattttgtagttgttttagatacgtttagttttgaaaaacgagggtatatttttggtttaggatttttttttttaagtatagttaaggttatggatattggttgcgtgtgggaattcgtttttttttatttttttgttttttttcgggattgtagtagttttttttatttgagtttagtcgttaaatataatagtttttttttttttttattttttttttttattagattttattgttttaataaatttagaataatatttagatgttagtgaatgtttttagagggttgaagggtgaaaatatttttttcggggttaaattttagatgatgaaatgatttttaaaatattataattatgttttaacgttcgatattagtattttagcgtttttttttttttttttgtagttggaaattttttttttagtgtgggtttgagtatcgtggtggaaggtaaagtaggacgatgagtagggttgttttgagataaagtttagtggatttttaattgtttttttatttttatgttcggtatttattattttggtttgagttaaagttaatgtattttattggaaattaatttttcgttttaatattatatagtagtaaagtttttttaagtatttatgttatagatgagtttgatgtgtagtttgtttttttagttatattttgtttattttgtgtgtttattttattttatacgttttagaatgtgatagttggaagggattttcgggattttgtggtttaatttttttttttttattacggaggaaatcgagatttagagaggttttttgtttagggatatgtattcggttggtatcggagttaggattagatgtaagttttttaatatttaggttggtttattttttgttttttttttttttaatggtttttattggtttagggttttgtttgagtttgattgtgttgtagtttgtaggttttgttgttttataagtgattgaaaatggtttttttttaggttttgggttgtttgtagatgtttttttgatgtggtttgtggttattgatatttaaatgtagttgttttgagtttgtggtattattatttattagtttaattaaaattgaaggataggggttgatatttagagaatagtaaagggggtagtgtttagaattagtttttaagttaggattttttatttaattgatagaaaagaatttatttaggattaagtaagaggttttattttttttagtt

SEQ ID NO: 167 - DNA, 8666 bp, Artificial Sequence
  chemically treated genomic DNA (Homo sapiens)
ttgtagggttttttttagtttaaagaaagtaattaggtgtttttattgtgttatgatttttatttttagttgggttttttagtttggttttaaagaataaaataaaaggtttttttgtttgagttttatttaatttattttttttatttataagaggtattttaaatttttacgatttttaaattttttaatcgattattttatttttattttgtaaataagttaatttttttatttatagaaggaagtgttttaatttttttttcgttttgatttttttttttttttaaatttatgtattttttgtgataaaatttataattatcgttgtattttgagttttatttttttattatttttgagggattttaagtttttaaaaatattttattttgtttgtgtatttaattttttttttatttttttttaatttttttttttttttatttggtatttgtttttttaggtatatgtgtgtttaggttttttttattttttatttgttttattttatggtatagggttttgaattattataattaagttatgaaagagtagttaacgtagtgtttttatttttttgttattttattattttagttttttttttggttttttgaggagttttttataggttggtttttaggaataagtttaaatgaattatttttagtttttttaaatttttatgtttttgtatatttttttatttttgtttagaatattttttttttttttttttatttttaaatttttatattattttttaagattgggattagtttttagtattcggaagtttttgtttattagagataaatgagaatgagtttggttatttttttatttttttgtattattttgtgttttattttgtttttttaagagtattatatgttttatttaatttttaaataattgtttgaggtaagtatagttattattttaattatgtaaatgagaaaatagaggtttagatatgttgagtaattttgataaaagttaaagaattaataagtggaatagttgaggtttgaattttggtagtttgattgtagagatattatgtttgatttatttttttttgtttttattttatgtttgtttttagtttttgagtttgttgaatgaatgaataggtggtagtttttttttgttataagattgattagaattaagataggtttaaattttacgtgtagaatttttaaaattgtaaaggtagtgtaaatttaaaaaaagaatggtatttttaggaaagaggaaaagtaagtgtgagaataataataataataattaataaattttagtaaatttagtaaatgtagtaaatttttatattaaaagtttttggatatatattattatattttatggttatatgaaatatattataattttattttgtatataggaaatttgagattggtataaggagtatagagatttaggattttatatttttatttttttaggattttgtattttaggtcgatatgtatgagtaaattgggagtataatgggttttttaatagaaaaattaggaaagtttttttattattattaattatttatataatatttttttaattttattattatttatattttaagttttagagtatatgtgtataatgtgtaggtttgttatatatgtatatatgtgttatgttggtgtgttgtatttattaatttattatttagtattaggtatattttttaatgttatttttttttttttttttttatataagatttataatggataatggattttaatttttagagtaaaatggttttatttaaggatgttataatttttttagagttttattgtaagatatgagatatatatatttaaaatttgtttttggtatttttaaagtagttaatttttatatttgtttataatgtatttaaatgttgtttttatatggttgtattttttattttttttattaatagttatatatattttttataagagttgaaagagtttttgatgtaggaatttatggtagagttttagagaaatttttgaatttattgaaagttttatttagaaatatatgtgtaagtgaatatattttttttaaaaaaaattattatttatttttttttttgagaagaaggtatttattttaatagatttttgaaggagtttattttttttatttttttatttttattaagaattattgtaggtcgggtacgatggtttatgtttgtaattttagtattttgggaggttaaggtgggtggattatttgaggttaggagttcgagataagtttagttaatatagtgaaatttcgtttttattaataatataaaaattagttgggtatggtagtatgtgtttgtaattttagttattcgggaggttgaggtaggagaattgttcgaattcgggaggcggaggttgtagtgaatcgagagagatcgtgcggtgttattttattttagtttgggtaatagagcgaaattttattttaaaaaaatatataaaataaataaataaaaagaaagaattattgtattagtgatggaaatgtgtttttttttttttattttggtaattatttttttttttttttattataaaatattttaaattaaattaaaataattttatttatcgatagtttgaattttttttattattgttatatagttaattgagaggtatttcgaggaaaatataaatggtatagtaatgtattgtagattttaataatatatttgatattttaaattgtttttattggttttattttaaaaattatatgttttaaaattaagtagatattaaaagtataagatatattgggtttataaggtttaagttaattagggattgaaatataatttttaaatagagttggattatttagtaggtagattaagtatgtgtttaaggtattagtaaagtttgagtaatttattttttaaaacgtagtatatgtttttgataagtttaaaaagtagtagttataggaaaaattagaatttttatttttttgcgtttgttatattttttagtgttgtttaatttttttttgtaagtgagggtggtggagggtgtttataatttttttagggagtaagttttttttggttttttttttttttttttttttttttttttttgagattaagtttcgtttttgttttttaggttggagtgtaatggcgcgatttcggtttattgtaattttcgtttttttttgggtttaagcgatttttttatattagttttcgagtagttgggattataggtatgcgttattaagtttcgttaattttgtattttttagtagagatagggtttcgttatgttggttaggtttgtttcgaatttttggttttaggtgattcgtttgtttcggttttttagaatgttgggattatagacgtgagttatcgtattcggattttttttttatgtaatagtgataattttatttaaagtatttttttttttttttgagtcggagttttattttgttatttaggttggagggtggtggcgcgatttcggtttattgtaatttttgtttttcgggtttaagcgatttttttgttttagttttttgagtagttggaattatatacgtgcgttattatggttagttaatttttgtatttttagtagagacggggtgttattattttggttaagttggtttcgaatttttgattttaggtgatttgttcgtttcggttttttaaagtgttgggattataggtgtgagttatcgcgttttgttttaaagtattttttttttatgttttaaaataagattgtaagttagtttttaaagcggataatttaagagttaataggtattagtttaggatgtgtggtattgtttttaaggtttatatgtattaatatattatttaaatttataataatttttataaagtagggggtatttatatttttttttttttttataattacgaaaaatgtaaggtatttttagtaggaaagagaaatgtgagaagtgtgaaggagataggatagtatttgaagttggtttttggattattgtgtaattttgtttttagaatattgagtattttttttggtttaggaattatgattttgagaatggagttcgtttttttaatgattttttttttatttttttatttgtttataggtagaattttttttcgttcgtattaaataaattttatttttttagagtttgtttttatattaggtaatgtatacgtttgagaaatttttgttttagatagtcgttttatacgtaggaggggaaggggaggggaaggagagagtagttcgattttttaaaaggaattttttgaattagggtttttgatttagtgaatttcgcgtttttgaaaattaagggttgagggggtagggggatattttttagtcgtataggtgatttcgattttcggtggggtttttataattaggaaagaatagttttgtttttttttatgattaaaagaagaagttatattttttttatgatattaaatatttcgatttaatttggtagttaggaaggttgtatcgcggaggaaggaaacggggcgggggcggatttttttttaatagagtgaacgtatttaaatacgtttttgttggtaggcgggggagcgcggttgggagtagggaggtcggagggcggtgtggggggtaggtggggaggagtttagttttttttttttgttaacgttggttttggcgagggttgttttcggttggtgttttcgggggagatttaatttggggcgattttaggggtgttatattcgttaagtgttcggagttaatagtatttttttcgagtattcgtttacggcgtttttttgtttggaaagatatcgcggtttttttagaggatttgagggatagggtcggagggggttttttcgttagtatcggaggaagaaagaggaggggttggttggttattagagggtggggcggatcgcgtgcgttcggcggttgcggagagggggagagtaggtagcgggcggcggggagtagtatggagtcggcggcggggagtagtatggagttttcggttgattggttggttacggtcgcggttcggggtcgggtagaggaggtgcgggcgttgttggaggcgggggcgttgtttaacgtatcgaatagttacggtcggaggtcgatttaggtgggtagagggtttgtagcgggagtaggggatggcgggcgattttggaggacgaagtttgtaggggaattggaattaggtagcgtttcgatttttcggaaaaaggggaggttttttggggagtttttagaaggggtttgtaattatagatttttttttggcgacgttttgggggtttgggaagttaaggaagaggaatgaggagttacgcgcgtatagatttttcgaatgttgagaagatttgaaggggggaatatatttgtattagatggaagtatgttttttattagatataaaatttacgaacgtttgggataaaaagggagttttaaagaaatgtaagatgtgttgggattatttagtttttaatttatagatatttggatggagtttattttttttattaggagggattattagtggaaatttgtggtgtatgttggaataaatatcgaatataaattttgatcgaaattatttagaagcggtcgggcgcggtgttttacgttttgtaatttttttattttgggagattaaggcggggggaattatttgaggtcgggagttcgagattagtttggttaataggtgaaatttcgtttttattaaaaatataaaaagtagtcgggggtggtggtaggcgtttgtaattttagttattcgggaggttgaggtaggagaatcgtttgaattcgggaggttgaggttgtagtgaatagcgagatggagttattttattttagtttgggtgatagagtgagattttgtcgaaagaaagaaagagagaaagagagagagaaaaattatttagaagtaattatatattgtgtttatttttaattgagtagggtaaataaatatatgtttgttgtaggaatttaggaaataatgagttatatttatgtgattattttagaggtaatatgtagttattattttgggaatatttgttaatatttttgtttttttattatttttagtttatttgatatagtttatttgtgataagagtttttaattttttatttttgaatagaggtgttttttttttttttatttttgttttgtgagggagttaggggaggatttaaaagtaattaatatatgggtaatttagtatttttaaaattttgttaatagtttgaattcgggagtttggttttgtagttttataatattttagaagagattttatttgtttaaaaataaaaaggaaaaagaaaagtggatagttttgataatttttaatggagaagggagaagaatatgtagaaaaggggaaatgatgttggtttagaattttaattatattggtgtttaatataggaatatttatttatataatattttaaagtattaaatttatattagtatattattaaatggatatattattaaatgggtttaagtattttatatattttaatttaattgatttattttttttttgttttggatttttattatgatttaaatatttatatatgggttattttttagattttttatattatgaaatataagaaaaatttttaaggttagttttatgattaagacgaaggattttattgaatatataaaataataaatatattgtaatattttgtttttttttttgtagttgtaatttggtttgtttatattttttttttgtttttttgaaaattgagttagttttatttttttaggataggatttaataattataatataatttagtataattttttgatttaggtaaattatgtaatttgtgtttagtatgaaatgtatttaaaaataagtaatttttttttaatattattatttttaaattaatataataaataatagttattttaaaataaattgtttatttttattatgtagtatttaaattttaaggttgttatgattgtagatagtattttaaaatttttttttggaaatggttttgtttttaagatgatttaggaattaaagaggtgattattttttgtttaatgaatttttaaattataaatttgggaagtgttttagttttttattgttgttgttataaattattataaatgtgttagttaaaataaatataaaattattattttatagttttagagattagaagttaaaaatgggtttataaggttttattttttttggaaattttaaggggtaatttgtttttttgttttttttagtttttagtgattattaaattttttggtttatggtttttgtattttttttgtggtttgtgtttttatttttgtattttttttttgattgtgattttttaataaaaatatttggggttatgttgggtttattttgaaaattttggataattttttttaagattattaattaaattatatttgtaaagttttttttgttatataagttaatgtattaaaagtttttgaggattaggatatagatattgggggtgggggggtattatttagtttattataggaaggaattttagggttaattaaattagtttttttattttatatttgaagaaattgaagttttggaattggagagtattatgttaaatgaaataagttaaatatagaaagataaatattatatgtttttatttatttgtgaaatataaaataattatatttttagtagtaaagagtagaatggtggttattagagttggggggtgggaggaatggggagatggtaattaagatataaagttttagttaagatgggaggaataagtttgattgttttttttgagatgtgttttatagtatgatgaatatagttaaatagtaaattttaaatgtttttatttgataaaaatgttaaatatttgagatgatggataggttatttagtttgatttaataattttttattgtgtttaaagattataattttatattgtattatataaatatatataattgtattattttaatatataattttaaaattaatataatgaaaaagaaattgaagtttaatatttttagaagttaagtgtaatttaaaagttttgtgagaatttgttttaataaataaataagttttttttttttaataattattatattttgcgtttggatatatagtagtgaataaaaaaaaaaaaaaaaaaaaaaatttttaggtttaatataattttaggaagaaattttagtagttgtattttaggggaaatataggaagttagtttggagtaaaagttagtttgtttttgtttttttgttattttgttcgtgttttatagtgttttttgtttgtgacgatagtttcgtagaagttcggaggatataatggaatttattgtgtattgaagaatggatagagaatttaagaaggaaattggaaattggaagtaaatgtaggggtaattagatatttggggtttgtgtgggggtttgtttggcggtgagggggttttatataagtttttttttcgttatgtcggtttttattttggttttgattattttgttttttttggtagg

SEQ ID NO: 168 - DNA, 8666 bp, Artificial Sequence
  chemically treated genomic DNA (Homo sapiens)
tttgttagagagaatagaatggttagagttagggtgggggtcggtatgacggaaaggaagtttgtgtagagtttttttatcgttaagtagatttttatataagttttaggtgtttaattatttttatatttgtttttagtttttaattttttttttgagttttttatttattttttagtatataatgaattttattatatttttcgaatttttgcggagttgtcgttataggtagagagtattgtgaggtacgggtaaaatagtaaaggggtagggatagattgatttttattttaggttaattttttgtattttttttgagatataattattgaaatttttttttgaaattatgttaggtttggagatttttttttttttttttttttttgtttattgttgtatatttaagcgtagaatgtggtaattgttaaaaagagaaaatttgtttgtttgttaaaataaatttttataaaatttttaagttatatttagtttttgggaatgttgaattttaattttttttttattatattagttttaaaattatatattgggatagtatagttgtatatatttatgtggtataatatgaagttatgatttttgaatataatggggaattattaagttaagttaagtaatttatttattattttaaatatttgatatttttgttaaatgagagtatttgggatttattatttagttatatttattatgttatgaaatatattttaaaaaaaataattaaatttattttttttattttaattgaggttttatattttgattattatttttttattttttttattttttagttttagtaattattattttattttttattgttaagaatgtaattgttttatattttatagataagtgagaatatgtgatatttgtttttttgtgtttggtttattttatttagtataatgttttttaattttaaaattttaatttttttaagtataaaataagaaggttagtttaattaattttaaaatttttttttgtggtaggttgaataatgtttttttatttttaatgtttatgttttaatttttaaaaatttttaatatattaatttatgtggtaaaagaggttttgtagatgtgatttaattaatggttttgagggagattatttagaatttttagggtgggtttaatataattttaagtgtttttattagagggttatagttagagagaagatataagaatggaagtataggttatagagaaaatatagagattatgagttaaggaatttgatggttattagaagttggaaaagataaggaaatagattgttttttagagtttttaaaaggaatgaaattttgtggatttatttttgatttttgatttttagaattgtaaaataataattttgtgtttgttttagttaatatatttgtgataatttgtaatagtagtagtaggaaattaaaatattttttaggtttatgatttgagagtttattaaataagagatggttatttttttggtttttaaattattttggaaataaagttatttttagagaggaattttaaaatattgtttgtagttatagtaattttaaaatttgagtgttgtatggtggaagtagataatttattttaggataattgttatttgttatattagtttgaggatggtggtgttaaagaggagttatttatttttaggtatattttatattaaatataaattgtataatttgtttaaattaaggaattatattaaattatattatggttattaaattttgttttgagaaagtgaaattgatttagtttttaaagagataaagagaaagtataagtaaattaaattgtagttataaaaagaaagataaaatgttgtagtatatttattgttttgtgtatttaatgaagtttttcgttttggttataaaattagttttaaaggttttttttatattttatagtatgaaaaatttaaaaagtaatttatatgtaaatatttaaattatgatagaaatttaaagtaaaaagaaaatgaattaattgaattaaaatgtgtaggatgtttaaatttatttgataatatatttatttgataatatattaatatgaatttagtattttaaaatgttatataaataaatgtttttatattaaatattaatgtagttaggattttaagttaatattatttttttttttttatatgttttttttttttttttattaaaaattgttaaaattatttattttttttttttttttttgtttttaaataaataaggttttttttaagatattgtaggattataaagttaaattttcgggtttaagttgttggtaaaattttagagatgttaagttatttatgtattaattatttttaaatttttttttaatttttttataaaataggagtagggagaggagaaatatttttgtttaaaaatgaggaattgaaaatttttattataaataaattatattaagtaagttaaagatagtaaaagagtaaaaatgttagtagatatttttaaaatggtaattatatattatttttggaatgattatatgaatgtggtttattattttttaagtttttatagtaaatatatatttatttgttttatttagttaaaaataaatataatatgtagttgtttttgaataatttttttttttttttttttttttttttttttttcgataaagttttattttgttatttaggttggagtgaagtggttttatttcgttgtttattataattttagtttttcgggtttaagcgatttttttgttttaatttttcgagtagttgggattataggcgtttgttattattttcggttattttttgtatttttagtagaggcgaggttttatttgttggttaggttggtttcgaattttcgattttaggtgatttttttcgttttgattttttaaagtgaagggattataaggcgtgaggtatcgcgttcggtcgtttttgaataatttcgattaaaatttatattcgatatttattttaatatatattatagatttttattgataattttttttagtaagaaagataagttttatttaggtatttgtgaattggaggttaagtagttttagtatattttatatttttttaagattttttttttattttaaacgttcgtaaattttgtatttgataaagagtatatttttatttaatataaatatgtttttttttttagatttttttagtattcgagagatttgtacgcgcgtggttttttattttttttttttggttttttaagtttttagggcgtcgttaggaggaggtttgtgattataaattttttttgaaaattttttaggaagtttttttttttttcggagaatcgaagcgttatttgattttaatttttttgtaaatttcgttttttagagtcgttcgttattttttgttttcgttgtagattttttatttatttggatcggttttcgatcgtaattattcggtgcgttgggtagcgttttcgtttttagtagcgttcgtattttttttattcgatttcgggtcgcggtcgtggttagttagttagtcgaaggttttatgttgtttttcgtcgtcggttttatgttgtttttcgtcgttcgttgtttgtttttttttttttcgtagtcgtcgagcgtacgcggttcgttttattttttggtgattagttagtttttttttttttttttttcggtgttggcggaagagtttttttcgattttgttttttaaattttttggagggatcgcggtatttttttaggtaaggggacgtcgtgagcgagtgttcggaggaggtgttattaatttcgagtatttagcgaatgtggtatttttgaagtcgttttaggttgggtttttttcgggggtattagtcggaagtagttttcgttagagttagcgttggtaaggaaggaggattgggtttttttttatttgttttttatatcgtttttcggtttttttgtttttagtcgcgttttttcgtttgttagtaaaggcgtgtttgagtgcgtttattttgttaaaaagaaattcgttttcgtttcgtttttttttttcgcgatataatttttttaattgttaaattgaatcggggtgtttggtgttatagggaaagtatggtttttttttttaattataagaaaaagtaaaattatttttttttagttgtgagagttttatcgagaatcgaaattatttgtacgattagaaagtgtttttttatttttttaatttttgatttttaggagcgcggggtttattaagttagaaattttagtttaaaggattttttttggagagtcggattgtttttttttttttttttttttttttttttgcgtgtaaaacggttgtttggggtaagggttttttagacgtgtatattgtttggtataagagtagattttgaaaagatgaggtttatttaatacggacgggggagaattttgtttgtaggtagataggaaaatggggagggagttattggaaggacggattttatttttaaagttataatttttagattagaaaaagtgtttagtgttttagaagtagagttgtatagtgatttaaagattagttttaaatattgttttgttttttttatattttttatattttttttttttattgaaaatattttgtatttttcgtaattataaagggggaagggaatatgagtgttttttgttttataggggttgttgtgagtttaaatgatgtattaatatatataagttttaagaatagtgttatatattttaagttaatatttgttagtttttgaattattcgttttgaggattggtttgtaattttgttttgaggtatagaaagaaaatgttttggagtaggacgcggtggtttatatttgtaattttagtattttgggaagtcgaggcgggtagattatttgaggttaggagttcgaggttagtttggttaaaatggtgatatttcgtttttattaaaaatataaaaattagttggttatggtggcgtacgtgtgtaattttagttatttaggaggttgaggtaggagaatcgtttgaattcgggaggtagaggttgtagtaagtcgagatcgcgttattattttttagtttgggtgatagaatgagatttcgatttaaaaaaaaaaaaaaatgttttggatagaattattattattatataaaaggaaagttcggatgcggtggtttacgtttataattttagtattttgggaggtcgagataggcggattatttgaggttaggagttcgagataagtttgattaatatggcgaaattttgtttttattaaaaaatataaaattagcggggtttggtggcgtatgtttgtaattttagttattcggaggttgatgtaggagaatcgtttgaatttaggagaaggcggaggttgtagtgagtcgagatcgcgttattgtattttagtttgggagataagagcgaaatttggttttaagaaaaaaagaaagaaagaaagaaagaaagattaagaagaatttattttttgaaaagattatgggtattttttattatttttatttataaagaaaagttaaatagtattaaagagtataataagcgtaaggaggtaaaagttttaattttttttgtgattattattttttaagtttattaaaaatatgtattacgttttaaaaaatggattgtttagattttgttgatgttttaagtatatgtttaatttgtttattggataatttagttttgtttaaaagttatattttaatttttggttgatttaaattttgtagatttagtatattttgtatttttagtgtttgtttgattttaaaatatgtagtttttaaaatgaagttaatgaaaataatttgggatgttaagtatgttattaaaatttataatgtattattgtattatttatatttttttcggggtattttttaattagttgtgtagtaatgatagggaaaatttaaattatcgataaataaaattattttagtttagtttaagatattttatgatggaggaggaagaaagtggttgttaggatgggagggagggaatatatttttattattaatataatggttttttttttttgtttgtttgttttgtgtgtttttttgagatggagtttcgttttgttgtttaggttggagtgaaatggtatcgtacgatttttttcggtttattgtaattttcgtttttcgggttcgagtaatttttttgttttagtttttcgagtagttgggattataggtatatgttgttatatttagttaatttttgtattattagtagagacggggttttattatgttggttaggtttgtttcgaatttttgattttaggtgatttatttattttagttttttaaagtgttgggattataggtatgagttatcgtgttcggtttatagtggtttttaatgggggtgggagagtgggaagagtaggtttttttaagagtttgttgaaataaatattttttttttaaaaaagaaagtaggtaatgattttttttaaaaaagatgtgtttatttgtatatgtatttttagataaaatttttagtgaatttagggatttttttgaaattttattatggatttttatattaagaatttttttagtttttgtgaaaaatatatatagttattggtgaagaagatgggagatgtaattatataaaaataatatttggatgtattataaataggtgtaaaagttgattgttttggaaatattaagaataagttttagatatgtatattttatattttgtagtagagttttggaaggattatggtatttttgggtggggttattttgttttagaaattgaagtttattatttattataaattttatgtaggggggaggggggagggatagtattaggagatatatttaatgttaaatgatgagttgatgggtgtagtatattaatatggtatatgtatatatatgtaataaatttgtatattgtgtatatgtattttaaaatttaaagtataaataataataaaattaaaaaaatattatgtaaataattaataatagtgggaaaatttttttagtttttttgttaaagagtttattatatttttagtttatttatatatatcgatttgaggtgtaaaattttagaagaatgaaaatataaagttttggatttttgtgttttttatgttagttttagattttttatgtgtaaaatgggattataatatattttatgtggttataaaatatgataatgtatgtttaaaagtttttaatgtaaaaatttattatatttattaaatttattaaagtttgttggttattgttattattatttttatatttatttttttttttttttgagaatgttattttttttttagatttgtattgtttttgtagttttgaaaattttatacgtgaaatttaaatttgttttaattttgattagttttataataaaaaaagattattatttgtttatttatttaataagtttagaaattaagggtagatatggggtgggggtagaggggagtaggttaaatatagtatttttatagttagattgttagggtttaaattttaattgttttatttattggttttttaatttttattaaagttatttaatatgtttgggtttttgtttttttatttgtatgattaggataataattgtatttgttttaaatagttgtttagggattaaatgaagtatgtaatgtttttagaagagtaaaataaagtatagaatgatataagaaaatgaaaaggtgattaaatttatttttatttgtttttagtaggtaaaggttttcggatgttgagagttgattttagttttgaagaatgatgtgagagtttaaagatggaaaagaaggagaaagatattttaggtagaggtaagaggatgtgtaaaggtatagaagtttaggaaaattgaaagtaatttatttagatttatttttgaaaattagtttgtgaaggattttttagagagttaaaagaaaaattaggataatgggatggtaaggaagtggggatattgcgttgattatttttttatagtttggttgtgatagtttaaggttttatgttatgaagtgaggtagatggaaggtggaggagatttgagtatatatatatttggaagggtaagtgttaagtgaagagaagggaaagttagaaaagaataaaagaaaagttaagtatataggtaagataggatatttttgaggatttgaggttttttaaaaataatgaagaaatagaatttaaagtatagcggtggttatagattttgttataagagatatatagatttgggagggagaaaaggttagaacggggaggaagttgaggtatttttttttatgaatgaggaggttagtttgtttgtagagtgaaaataagatggtcggttaggaagtttgagaatcgtaaaggtttggaatattttttatgagtagagaggatgggttgagtaagatttagatagagaagttttttgttttgttttttaaaattagattggagaatttagttgagggtggagattatgatatagtagggatatttgattattttttttaaattaaagaaagttttgtag

SEQ ID NO: 169 - DNA, 2501 bp, Artificial Sequence
  chemically treated genomic DNA (Homo sapiens)
gaaaattaggttgagtaggttggttttttaaagaaatttattgagtttttataatgttttttttatttgacgggagaaaaggggttttggaagattaagtgtgaagttttagaattttgtttggagttggttaggattatttaggtttgagtataagtaaagcgttgttcgtggtgttagtaagcgcgaatgttttcggtaacgttttttttatttaaagttgttttttatttagttaatttgtttcgcgaagtttatatatttgtttcgtgtaagatttttagttattttatttagttattggttttttttttattattattttttatgttttttttaaagaaaaatattattttttatttttttattaattttaaatagtttttatttttttgatatatttattatttaagaaaatggtttaagaattgggttagattattttgttttaatttttttgataagttttagagaaatttaaaggttaaaataagagtataagagtaaaaggtagagaaattaagaaattgaagattaggaaatgggggttggatgggaaagaaaaagaaattgttattaatgttattcggtttttttttttgtttaggtggattttagttttgttgaggttttgttagtagatttttagttttaattagtatttttatggtggtggtatttttattgtttttaaaagaaagagttttttttaattttatagggatttgggggatgaggagttagagttaaggtattttaaaaaaaatatgtgaagatttttattttgtaatatataagtaattgtttttttgttaagattttgttttttttagtatttcgaattaaaatgattttgtaaataaaaattgtttatttttaggagaggtttatttatgtagttttttattaaagtttttaggtaataaatttataatttgcggttttttttttatttaatgtagtattcgttgaaatgttttaaatattttaagtaataaatgttgatttaaatttatttaggaagattaggaaggggaaaaaaagtatttggtatttaaatttttagaagagaatttaatgataggtttagtttgtttaatgataagtttagtattatattttttttttatgatgttttattattattgtataaattttttttattatttatgataaataaaaataagatatttgataaagtgggtttaaataggtaagagtgtaaataaagatttattgtataaatatgatgaaattgggattttagatttttaaagtataatttttttttgttttatgtgtgttaggttgttatttttaatttcgaattagttttttttttttttaagggttgtatttataatgtaaaaatggaaagaattaaaaagtatacgtaaaatatgattttcgggatttttttttatttttatggttgattaatttaaatagaaagatatatttaagagaaaattgttaagtttgatataagttatgaaatttgtgaagtttaagtattgtttggggatgaatttaatttgtatgataggtgtagagttgtcgtttttagatattttaagaaatacggagttattttgaatgattttttttcggttataagggagttattaacgtttttatagtgaaattaattggttggttgaaggaatagaaattttttgtttcgtttattggggattaggagttgagggtagtggtgaatatttttaaaatattagttttggttttattggatatttagcgagtagtgtagttagtatttttggcggttttttggtttagtttttggcgtatgcgttttagtatttttgggtaggttttttcgttttcgtgacgcgtcggttcgggtttggtttttcggcgattatagcggatagggggcggagtttaagggggtggggagacgtcggttttttggtttagttgaaaacggaattttttgtcggttggttttttattttgttagagcgaggcggggtagtgaggatttcgcgacgcgttcgtattttgcggttagagcggttttgagttcggttgcgttcgcgttaggcgtttttttttagaagtaatttaggcgcgttcgttggtttttgagcgttaggaaaagttcggagttaacgatcggtcgttcggttattgtacggggttttaagtcgtagaaggacgacgggagggtaatgaagttgagtttaggttttttaggaaggagagagtgcgtcggagtagcgtgggaaagaagggaagagtgtcgttaagtttacggttaacggtggattattcgggtcgttgcgcgtttgggggttgcggaatgcgcgaggagaataagggtatgtttagtgggggcggtagcgatgagggtttggttagcgtcgcggcgcggggattagtggagaaggtgcgatagtttttggaagtcggcgcggattttaacggagttaatcgtttcgggaggcgcgcgatttaggtagttggggttttagggt

SEQ ID NO: 170 - DNA, 2501 bp, Artificial Sequence
  chemically treated genomic DNA (Homo sapiens)
gttttggggttttagttatttggatcgcgcgtttttcgaaacggttgatttcgttgggattcgcgtcggtttttaggagttgtcgtattttttttattagttttcgcgtcgcggcgttggttagatttttatcgttgtcgtttttattgggtatgtttttgtttttttcgcgtatttcgtagtttttagacgcgtagcggttcggataatttatcgttggtcgtaaatttaacgatatttttttttttttttttacgttgtttcggcgtatttttttttttttaggagatttgggtttagttttattattttttcgtcgtttttttgcggtttggggtttcgtgtagtggtcgagcggtcggtcgttagtttcgggttttttttggcgtttaagaattagcgggcgcgtttggattgtttttgggaaaaagcgtttagcgcggacgtagtcgagtttaaagtcgttttggtcgtagggtgcggacgcgtcgcggagtttttattgtttcgtttcgttttggtagagtggggagttagtcggtaaagaatttcgtttttagttgggttaaggggtcggcgtttttttatttttttaggtttcgttttttgttcgttgtgatcgtcgggaggttaggttcgggtcgacgcgttacgagggcggggaagtttgtttaaagatgttaggacgtatgcgttagagattgggttagggagtcgttaggaatgttggttgtattgttcgttggatgtttagtaaagttaaggttaatattttgggaatgtttattattgtttttagtttttaatttttagtaggcggagtagaggatttttgtttttttagttagttagttggttttattgtggagacgttggtggtttttttgtgatcgagagaaagttatttaaaataatttcgtgttttttaagatgtttgaaagcgatagttttgtatttgttatataagttaaatttatttttaggtagtatttgggttttataagttttataatttgtattaaatttagtaatttttttttggatgtgtttttttgtttgaattagttaattataaaaatagagaaaaatttcgagaattatgttttgcgtgtgttttttaattttttttatttttgtattatggatataatttttaaaagagaaaaaaattagttcgagattgagagtggtaatttggtatatataagataaaaaaaaattatattttaagaatttgagattttagttttattatatttgtatagtaaatttttgtttgtatttttatttatttaaatttattttgttaggtattttatttttatttattatgagtaataaaggaaatttatgtagtaataatgaaatattataagagaggggtgtggtgttgggtttgttattaaataggttgaatttgttattaaatttttttttgaagatttaaatgttaagtgtttttttttttttttttaatttttttaggtgagtttgaattaatatttattatttaaaatatttaaaatattttagcggatgttatattggataggaagagaatcgtaagttatggatttgttgtttaaaaattttggtgaggaattgtataagtggattttttttaaaagtgaatagtttttgtttatagaattattttggttcggagtgttgaggaagataaagttttaataggagggtaattgtttgtgtattgtaaaatgagagtttttatatgttttttttaggatattttagttttgattttttattttttaaatttttgtagaattaaaaaaagtttttttttttaaaggtagtggaagtgttattattatggaagtgttggttagggttgaaaatttattgatagagttttaatagagttgaaatttatttggatagggaagggaatcgggtagtattaataataattttttttttttttttatttaatttttattttttagtttttagttttttaatttttttattttttatttttatgtttttgttttgatttttgagtttttttgaaatttattagaaaagttaggataagatagtttgatttaatttttgagttatttttttaggtagtaaatatgttagaaaaatgaaagttgtttggagttgataaggaaatggaagataatgtttttttttgagggggatataaagaatggtgatagggaaagaattaatgattaagtaaaatgattgagaattttgtacgaggtagatgtgtgagtttcgcgaagtaagttgattgaatgaaaaataattttgggtagggaaaacgttgtcgggggtattcgcgtttattagtattacggatagcgttttgtttatatttaggtttgggtggttttaattagttttagatagaattttaaagttttatatttgattttttaaagttttttttttttcgttaaatagaaaggatattatggaagtttaatgaatttttttgaaaaattaatttgtttaatttggttttt

SEQ ID NO: 171 - DNA, 2501 bp, Artificial Sequence
  chemically treated genomic DNA (Homo sapiens)
gtgttttagtttttgaatttatgttgttcgttattatattgtattgtttgtggatgatttatttgtttttgtagttttatttgaagaatttttttttttttttttttgaggtttgttttaaatattattttttttgtgaagattgtttggtgttttttaggagagagtgtgatttttttttttaggaatggtagtattttaaatatatatattttgtagtatattttattttgtatggtaatggtttgtttgtgagttttatttcgtattagagggtgagggttttgaagatagcgttaggttttatttatttcgatattttataatatttattatatgtttgatgaatgaatgtatagggggatggttgggtgtattttttttaattttttaattttttgaaataaataataaaattttatttttttttagaagttttggtatggttttttttattttgttatagttattgataattatttttattttttgtgtaatttattaggtaagaagtttatgtagatttatttttagtagtttatatgataaataaatattgcgtttgatttttaaatattaaattatagtatattatagatagatatagagttattatttaaagtatgatattttaattttaaaaggttttttttgaagaatattataaattttttttttttttaagatttgttgggtaggaaagatgggagaaaatgaattaatgtttatatagaaaggaggataatgggggtaaaaataatagatgaacgtatgggtggatgagagaatggataaaatgataggtggatatgttgattttggatagatgggaaatgagtggatatattaataaatagatatgtgggtggatgggtggagaagaggatggtggatggttgtggttttatgaagagatgtgaaaaaggaagtgtggaatgatggatgagaagttgtatgggaagatgaatagaagaataggtggttgaataaattaaaaggtgtgtggttggatgaatgaatgagtgggatgatagatggatttaagtggttagtggatggataggaggatggatggatgtgagagttttagaaggatataaggaaagatgggtggatagatggatgggcggatggaaggatatttaggaggatgaatgagtatgtgtgtggagagaggtgtttatttatattggtttgaatatatgggttagttgagttaaatgttagttttatgataggttattagtagttttttttgagttgttttgttaagaagttaaaatttatttaagttatgtggatttgttattgaggggaaaaagaatgagttttttttttttttatttggaagatttattaattttttattttttattttttattgtgggtacggaggtattgcgttatttagggtaagatttcgttttttttttagttttttttttaggatatttaatattttgtgaaatttagagattttgttttagtcggatttagagaaatttagcgggaaaggagaggttaaaggttgaatttaatggtgtaaggttttacggttcggttattttttgttttgacgtcgcggggttagcgggagaagaaagttagtgcgtttttgggcgtaggggttagtggggttcggaggtataggtatttcgcgatattttaggtttttcgatttacgtttttggtagtttcgattatttatagttttagtagagtacggggcgggggtagaggggttcgttcgggagggttgttattttttaaaatttttgcgggttgtttagttatagttttttttgtttgggtgtgtttttcgttcgtttttttttttcgttttaggttattgtttttaatttcgaataaaaattgtagttaattttcgaggtagttttattgtttagcggattttagtttttgttaggttcggttcgttattttcgtttcgtttttcgtcggtttttgtttcgcgtttagggattttttagtttttttcgttcgcgtttttcgttcgtttcggatattatggataagttttggtggtacgtagtttggggattttgtttcgtgtcgttgagtttggcgtagatcggtgagtgttcgtcgtagtttgggtagtaagatgggtgcggggtgtttagcgcggattcggcggtagttttttcggttgagtcggttttgggggattggagttaagtgagttgtttgcgaagtgtattgggtttcggaaagtagggttgggatttgcgttaaatcgttggagaatgtgtttgtggaagtattatttggttgaaagaaaaagagaaagagaagaaagtttgttgggtaggttgtcggcgcgtagttttgggcgaggtcgttagagttgtagtatatggtagaaagtaatcgttttttcggatgcgtatagtcgttgtttggattaataggtttttgtgtttaagggttcgttaagttttatcgggttgtgtttaggtagggtagagttgggcggggta

SEQ ID NO: 172 - DNA, 2501 bp, Artificial Sequence
  chemically treated genomic DNA (Homo sapiens)
tgtttcgtttagttttgttttgtttagatatagttcggtggggtttggcgagtttttgggtataggagtttgttagtttagataacgattgtgcgtattcgggagaacggttattttttgttatgtgttgtagttttagcgatttcgtttaaaattgcgcgtcggtagtttgtttaataaattttttttttttttttttttttttttaattaaatggtgtttttatagatatattttttaacggtttagcgtaaattttagttttgtttttcggagtttaatgtatttcgtagatagtttatttgattttagttttttagggtcgatttagtcggaggggttgtcgtcgggttcgcgttgagtatttcgtatttattttgttgtttaggttgcggcgggtatttatcgatttgcgttaggtttagcggtacgaggtagagtttttaggttgcgtgttattaaaatttgtttatggtgttcggagcgaacggagggcgcgggcgaaaggagttggaggatttttgggcgcggggtaggggtcggcggaggacgggacgaggatggcggatcgaatttggtagaggttggggttcgttgggtaatgaggttgtttcggaagttggttgtagtttttattcgaggttgaaaatagtgatttaagacggagggagggagcgagcgaaggatatatttaagtaaggggggttgtgattaagtagttcgtagaggttttaagaagtagtagttttttcgggcgggtttttttgttttcgtttcgtgttttgttgaggttgtaaataatcggggttgttagggacgtgggtcggggaatttggagtgtcgcggggtgtttgtgttttcgagttttattggtttttgcgtttagagacgtattggtttttttttttcgttggtttcgcggcgttaggatagaggatgatcgaatcgtaaaattttgtattattgggtttagtttttggttttttttttttcgttaaatttttttgaattcggttggagtaagatttttgggttttataggatgttggatattttgggagaggagttggagagagggcgaggttttgttttgggtggcgtagtgttttcgtgtttatagtggggagtgaggggtggggagttggtgaattttttaagtggaaagagggagagtttattttttttttttttaataataagtttatatggtttgaatgaattttagttttttggtagaatagtttagggaaagttattgatggtttgttatagggttggtatttggtttagttaatttatgtgtttaagttagtgtgaatgggtatttttttttatatatatgtttatttatttttttaaatatttttttattcgtttatttatttatttatttatttttttttatgtttttttggggtttttatatttatttatttttttgtttatttattaattatttaggtttatttattattttatttatttatttatttaattatatattttttaatttatttaattatttatttttttatttatttttttatataattttttatttattattttatatttttttttttatatttttttataaaattataattatttattatttttttttttatttatttatttatatatttgtttattgatatatttatttattttttatttgtttaagattaatatatttatttattattttatttatttttttatttatttatacgtttatttattatttttgtttttattatttttttttttgtgtaaatattaatttatttttttttattttttttatttagtagattttaaagagaggaagagtttgtaatattttttaggggaagttttttgagattgaaatattatattttgaatgataattttatatttatttataatatattatggtttaatgtttggaaattaaacgtagtatttatttgttatgtgaattattaaaagtaaatttgtatggattttttgtttggtgagttatatagaaaatgaaagtgattattagtggttgtggtaagatgaaaggaattatgttaggatttttgagggaaggtaagattttgttatttattttaagaaattgaaaagttgagagaaatgtatttagttatttttttatgtatttatttattagatatgtaatgagtgttgtggggtatcgaggtaaataagatttggcgttatttttagagtttttattttttggtacggaataaaatttataagtaggttattattatgtaaggtgaaatatgttgtaaaatgtgtgtgtttggggtgttattatttttagagaagggagttatatttttttttggagaatattaggtagtttttataggggaagtgatatttgaggtaggttttaaaggaaaaggaggaggaattttttagatgaaattatagggataagtaagttatttataggtagtatagtgtagtgacgaatagtatggatttaggagttagaatat

SEQ ID NO: 173 - DNA, 16579 bp, Artificial Sequence
  chemically treated genomic DNA (Homo sapiens)
tgttttttaaaatgatgtttagttgaattagttaatggagataaaaatatttatatataatttttttttaagtttattagttattttatagattagttataattttggttattttaatgagttaatttttttttagagatattataaattttttaaagatggaaaataattgttatttttttgaataatgtttattatttaaaataatgtatataaaagttgtttaataaatttttgttgaattgagagaaaatataaaaaattgaaagtagtttgtttgtaataagtgtttgttaagttttatagatttttttttttttttggaattattgtaataaatatttgatttttgatttgtaggattaaaatgtgattttttatattttaataggagtaagtattagttttgtaattttttttgttaatagaataaaaatggaatgtatgtttgttgtttttatatgtcggttgatatttatgttgaatattttttttataacgtagaggtttttttgttttttgttttgcgttttatttttgtttattatagagatattaatgatgttatgtgtttttttgtattattagtgtagtagtttttattatgttttttgtttcggttttattgtagtttaattaaataaatggaaacgggtagttattgaaaataaatagtaattgtaaaagttttgttttttaagaaattttttgtattgtatttcgttttgttttattgattttaagatttttatcgtttttttgtgtttagaaattagattttttagtttgttttgttttagttagataaatgttttataaaaatgatttatattttttagattgtggggagagaagaaaaagattttgagaaagtgattaaggagggagtaagagtgatataatttttgatttaatttagttggattgtgttttttatgtttttatttttttttttataaaaaagatagcgtttttgatgttttgttttaggtagttttttagggtgagtgtagatgtgttgagttatttggttgttttgaggatcggtttagagagtttttttttttattaatgaagttattttttttcggtagttcggttttttttattattttatgttggaatttggttttggtttgtatagttttgtcgtgatgtagatggttttttagttaagttttagagaaatttgtttaattatgaataggatatttatagtataggagaaaaaaaaatttattaaaataaatattttattgtaatattttgatttgggggttggagagtaaaaatttaatatttgatgtttgggaaaaatttaatgttttatggttttttaaggaaatttgtttgtgtttaatttattagagtaatttatatatttcgggttaaagtataatgagattgttattattattttgttttttgtaagattttttttttaagaataaaaagaaggtaataaagattttatatttttgttttttttagaaagttaaagagaatttaaagtgttggatgaaatgtttgtttttaatttgtagtgttttatttaaaaaaaaaattatgatataattttagaggataggttttttttttttagggtttttgaaagttaaaagtatatttttaatttgtagtattattgtattatttagtgaggataatttgtttagttgtgtttaggattagttagattaaggagttgaaattaagttttttttgaatttgaatgggattggaattttgttatttttagagtagtaatagatgatgttatgtttaagaatattttatttgattaataaaaaaggagaagtttgaaatgtaattttaaagaattttagaaggaggtttagatgaagataataaaattttttggagatatatttgttatttatattttttttttttaagttattggtttgttgtttttgagtttagttaaatttttaaagataagattaaagtaaggaagtaaggtatatagtttttggtttatggttttttttagatataagtattgtgaatgaagattttgttttatttatatttgggattttggagtttttataaagaatatttttagtataaggatgtgatttaaagggggatttatagaataatattttaattattgtttgatttatatttgagtgtaatggataaataaatataattttagttataaaatttgaaaaatatatatttttttatttaaaaatttttgatagttttgttaggtattggagaattagaaataaatgtttttttatttttttttttttgatgaaggaaagttattaaaaatagttatatagaaataataatataattgtagattttattttaaatatagttggtatgttttttttttttttttttatttattttttattttagatagttagaggggaaagtttgttttagagatagaaagaagatatttatggggtataattttattttagttatttgatagtttgaagaagtatttaattttttgaataataatgttataagttaaagaagagaaaagataggtagtttaaagttttttaatattgtgtatattttaattttttaagttagttttgagaaagtgtttttgttttgtagaagtatttggttaagtgttgtgaagtttattggtattaaaagaaattaaaaattttggaggattagagaattaaatttggtaatataaatgaaaatattttagaatgtaaaaagtatttaatttattatttttaattatgttttattatatatagatggtattatttatagtgaatgttaattattaatatttttttaaaaatgggtattaatttgttattagttgtttgtttttgatttagtttttttttgttgaaaggttttatttaattgtattataaagggataaaagggtaaaagataataagttttttagattggtagatttgttatttataaaatggttttgggtaggttatttgaattttttgaaatttaattagatttatttaaatttaagaatgagaatataaatttatattttgaagtgttttatagaaaggtttattttaatgtttggagtatatattttaatgaatatttattttattttatttttttttatttttgaattaagtaattttgaatttaaagttgttatgattagtattgaaaagattattggattattaattgtgtgattttgggatagtaattttttgtattttagtttgtttatatgttatatatgaaggttgaagtttgattttgttttgtgattattattttaaatatttgatgaaattaaattttagtgtttggaatggtagtataataaatttattaagaataaataatttattgtaaaaatatattgatttttaaatgatgtaattgatagttatattattgtagagggttgataaataataaaagaaatgaaagatgtatatggtgagaattgaaattattttgataagttttttatttgtttattatttaaaattaatgattatgttgaatgtttataaattataaaatataaaagaaattttataaatgcgtatgtataggagtttaagttattaaaagttttaaagtataagtttaaattaaattaattaaagaagttgagaggaaaaattggtttttatttttaattattattgttttgaggttttatgtttaatataattttttaagtagaggttttagagagaagagttgtgaggatatttttatatttgtgtagaaggaaaagtttgttatttattttagtatttttagtgttatattgatgtgtattttggatttattttgtttttattgtataaatttatatttgattttaaagaaaaggaaaatttaaagttttttttttttaaggggatagaaattttttgtgttaattgtttgatttttttttttgtaaggttttattggaaattttttgtaatataatgtaggggatttttttatgtgttgatgttgtttatatagtggggtgggtttgattgaagaaaaaaaatcgtatatacgtatgaaagattatggttttattttcggaaagtatgaaaggtgattgatatttttaagaagtttttgttatttaggaaaattattaaatattttatttagagatatttggaaagattgaaggaaaggaagaacgaagaaagtagaatttagatttatgtggggagagatttgtggtagaggaaaagtattttttttgaattcgataagggatttgtttgggggaattttttgtttagttttttattattagggttttttgaagtcgggttttttattgggtagttttttgggagtgtagtggggaatttttatattttttttttaggttttcgaaggatttcgtttttttagtgttttttttaggttggtaggagttttgagtttgatatttttttttgatgggataggtaagttttgtgggcgcgtaaatacgttgtaattaagttttttgttgattttatagttttgtgtgttttcgagaagaagtgatcgtatttaattgtttattgttggtttgttttttaagagtttgggggttttttttttttaatttagaattagttgtacggggggcggggaagtgggggtggggaaggagtgggagggtagtggttttcgcgagtagagcgatgttattgagtgagtttttgaatggggagcgttgttgtttttaagtcgattggtattttttgttaggaagaaacgttaagaggtgggagtgtttggggagggaggtaggcggtttttatcgtaggcgcggggagttgttttttcgttttttcgtttgttttttaagtttggatttttaggagtggttgaagttgcggagcgtttttggagtttgtgaatgaattttttttttttttttttttttttttttcgttgagtttttttttcggttttgacggtatagtgatataatgatgatgggtgttataattcgtatttgaatttgtaggcgagttgtttcgagtttttttggggaagaattttaggcgtgcggacgtaatagtcgagaatattaggtgttgtggataggagttgggattaagattttcggttagtttcgtattttttcgtattttttagtatcgtttcgtatttttcgtattttttttcgggttattacgttttttatgtgattcgtttgggtaacgtcgaatttagtcgcgtagcgttgtagtgaattttttttttaaattgtaataagtcgttttttaaggtaattacgttttttttgttttttttttaaaaaataaaaataaaaaatttatagaaaaaaattcgcgagtttagaaaaaagaagtaattggtagaaggttttaattaaggtaaagagttgtaaggcgaagttaagaaaatgtaggtatttaaaaaatgtaggtaatttttataaaggtttttggggagaggtatatagagggattttggtgttgaaaaagatttagataaaagaaatttagggtggggtgggggtaaaatgattaacggaattgggggaagggagggaataaattgtaaagaaattatagaaaagtggtgggtttttgagttggagagaagagagggatttttggtattttgatttttttgttgttgttgtttttaatacgttcgaggtaaaagtttgaatggggattattaagatttgttatagataagttttcgaagtcgttttggtgtaggttatttggttttttagtttttggtgtgtggttagtgtttggtgtttttggaaagttattttcgggtagtttttgatagtgcgattcggcgtttaagtagtttgggattttgcgcggatttgatttttttagatcgtaggtagtttgggaggaggttcggtcgggggaggtgtaggattttcgtcgtgtttttttgacgatttggggattgttacggttttttttcggcgtttttgggtttttttgttttgtacgcggtgcgaaggggttagtagggaaggagtagaggatggggggtggggttgttggagtttcgcggaggtttgggaggtttttgggcgggaaaagtttgttttgaatcggtagggatgtgtaataattttttttattttgaagagtgaaatagggtttgtcgtttttattttaataagtaaatcggtatttagagcgtattgtagataaaggtggttcggggattcgaattaggggtttttgggttagttttttcgtttagattataggagtttttcgtttttttatatattttttatttttttttagtttttcgttttagttgagtaattttattggtaggtttagcggtagcggcgcgcgcgtgtgtcgggagtttcgggggacgttttcggttggagcgttttatcgttttgtagaggcgtgggcgttgtagggcgatatttttggtgcgtgtagatttagggtattcgggttgttttggttcgcggtttgtgttattgggcgtggagcggtttgggtgttaggtagaggagagcggggtagaaaaatagtgttatagtttaaattatttgttttttaatttaattgcgtttcggtaagttttgtatgtttttgggagatgttgcgggaagggggagaaatttatacggcgtttggagagttgttttgtcgcgcgtatattcgcggtagagtttttttgggtcgcgttttttatttttgtgtttttttttgtttttattttttttgttttttttttttttttttagtttttgttttttttttttagtttttgcgtttttttttttatagttgataaatgaatggttagtgtgaaatttttgtttttttcgtgttttaaggtagtagggagggaggagcgagggaggcggtgcgttttttcggatttgtttttagtttagtttataagatttgtagaatttagatgtttaggaattgggagttttgcggcgggtgtgggcgttttttgatggagaagtttcgtataggcggagaaaaataagttttttagattaagcgtgtattttttataattttgtgtttaaggatggaaggttttagtttttttttaagttatttattttgtattttataatttgcggcgtatatttaggagtttggaggattttgaaaaaaggttttggtttgtgtaaagtgtagagatgttttttcgcgagtcggttggaacgtacgcggcgttttgggtttagttcgtcgtttagtggacgaacgtatatggtcggggtggagttaggtttcggaggtttagacgcgttattttgggcgtttttaagaaagataatatatatatcgtgtttttaaaatttatgattatttgaatttaacggtagggtttcgttttaggatattgtaaaagaagggtttttaatttaaaatttaaatttttttaattttagggcgggcgtcggacgggaaagtggagagaaggcgggtagtgggaggaaaaaagaaagggaaggaagggaagtggaaggaaagaggatcgtggaggggaggaaaaggagaaaggaacggagatggggtagatggtatttaaatagttaggaacggatcggaagggttcgtttcggggtttgggtttgaatttcgagattcgttttaggatattttttttttttttttagcggtaataaatgtgattgtagaggcgtgtcgggatggaagggtgggaaagaattagataagcggaggtggtttagtttcgtttaaaggggttgggtttggggttcgtttttattcgtttatttcgcgttaagggaggattcgtaacgggcgtttttcgtagcggttgggttagttagtcgttacgtgggttggcgtttcggtttttagtcgagacgggtgtgattttttgggtttagagattgtagtatagtcgtataggcggtcggcgtagtcgaggtttttatttatcgaggttaatgggggcggggcggggaaggtagggtttagtttaatcgagagagtcgagtggtttcgttttcgggattcggggtcggttgtttttggagttgattcgagttttatttagatagcgttgaatatttttattaaaaggttatttaagttttattttattttattttatttttgtttgttttttgggagtggtaggaggggtatcgtgtttttgttttgaggtaggggagaggttaaaatttattttaagtaaattttttgttagaaaaatgagattttatatcgtattttatttgttgattttttaaatatatttaggttattttaaagtttatttttagttaattaatagattaatttcgttttagattgttataaagagttcgtttggaatggtaaatattgttattcgataagattaatagaattttatgggggtaaatatggaagggttgcgagtgtaattgaggtttttgtgttttaatgaggaattttagcggggatttggcggggattggaagtttagtatttatttagggagtgattgagttggaaatttggagaagtttggtgtagacgagacggtgttttttagagttgtattttaagtttttttattttgttgtatattggaagaattggattttaaagattttttttattattttagattttgtagttaatagttacgtttttttttttttgtttgttgaaagttgtgatttaattgttttaagtattttttgataatttcgttaaatttattttgaaaatatttatataaagttttaaaataggatgttgtgagtgtaatataaaaataggaaggtattaatggaagtaataattagtgttttgagatagaagcggtttttagtttgtaatttggaaatgttaagagtagtatattagggagaaggtttttaagagtttgattttttgttttgagttttgagtaaagaaagaaatatgttagaattgtattgtttgttcgtagtaatattgtaaagggttttaatggattttaatgtgattgagtaattattttttttagtattaagtttatagtttttaatttttttgtgagaagattaggtaggaagcgggatgagatttaagataattatttaggatttatgttagaatttaaagttttgatttttttggtagataaaaatagagttggttttaaattgtattttttgtttttaaaaaaacgaggtttgaaaggaatttttttagatttatataggtttatagatgtaagttttttttttttttttgtgtttgtaaattggagggagatgtttttgatattttagaatatttgtatttatatatttgtaaattttgttaggaaaggatttaaatagttaaattaaaggtgattatgattaatgttaaagatattatttattgtttttttttttgttgtattattaggtttaaatattttggagttaatgattggttatttaattgagtaatagagtttttgagagcgtaaagattaattaattttgttttttaaagtttggtaattaagttttttttttttggtgagatttaaatatttttgttgacgttatttatggataaatatcggtaaatattgtatttaaaatgggatattgttttgtgatggagtagaattttttaagatatatggtttttttgaaagaaagaattaatgattgtagtaaggtatttttttattatttacgtagagaaattagttaggattgataaatatttattgttgggagttatttgttttggtttgagaaaatatgttgattgttatataggtttgtattttattagaaaatataaagtatgtattttttttgatttggaattagaaaagggggattagatatggatgttttggttaagttttattttaattagtgaatttttgttagtttttttttgtagtttagatttggtaaattatatatatataaagtttgtgtgtgtgtgtggggtgcgtgtgtgtgtgtatgtatatagggtttttaaatattgttaagtttttattattgaatgtgttagaggtggttgtattttagaggttagtataaagaatttttgtttaatgtgttagttttgttttttgaaatatatttttgggtagatttattaattataaaaggatataaatgtatatattttttatatttgtatatattttattttatttttttaaggattttaagaggtgtttatgtttataaaatgagattatatattttataataaatatatttgataaattataatttttttattattaaattattgatttgatattatttgaggtatagtggaatgagtattagatttggaattagaaagtttgagttggatttattagttgagaaaattaagtaaagatattatttttggatttttagtgttataatttattaaatgaatatgtagttataaagattaaaagagtaagtattttgaaaaattatataaaaaagggatgataatatattatgttttgggatttatattgatttaattttataattttaataataattgtattatttaagttatgtagtttttattgaatttataaaataaattagagaggggtatattgttttaaaaattgtttagttttattaattagaagatagattatagaaattgattttaatgaagttggatatttagtggaaaggaagaattatttaataaatggttttaggataattgatgggtttatgtaaaataagaattagtttttatttgattttttattttaaaagaaatataagatgaattaaatatgaaatgtagggaataattttttataaaatgataaaagaaaattatgggattaaaaaaaataagttaggaatagagaaatttgttttaagtaaaatataaaatttagtgttattttaggaaatattgataggtttgattaagtaaaaattatataaaagtaaataatatatttggaaaatatttacgatatttgagagataaaaagttaataatttttgatattttatggatttttatgaataattttgaaaagtttatatttattaaaatatgagtaaaaattatgtataggtagtggtagaaagagatatagagttttaaaattatagaaaaaatcgtttagttttatttgtaattaaataaatagtaattaaaatattaatgatatgttatattatttttttattaattagaggagtaataaaaaaaaataatttttttttttttttttttttttgagatggagtttgttatttaggttggagtgtagtggtacgattttagtttattgtaattttcgttttttaggtttaagtaatttttttgtgttagtttttttagtagttgggattatgggtatttattattatgtttggttaattttcgtgtttttagtagagtggggttttattatgttggttatggtagttgattttgaatttttgattttaagtgatttatttattttagttttttaaagtgttgggattataggtatgagttattgtgtttggtaaaaatgaaattaaaaagtttgatgtaagtttgtgttggttaggttgtggagaaattgggttttttatatattgttgtatgaaagtaaataggtttttttattttaaaaaataatttggtaattatttttttttgattttttattaaaagtttttaaaagatgtatatattttttgatttagtaattttatttttcgatattattatatggatggatattggtattaatattatttaagataaatggataaggatgttttttgtagtattgtttttaagagtaaatatttggaaatagtgtaataggtttattatagggaattatttaaataaaagttgttgtatttatttaatggaaaattatgtagttgttaaaaataatatggaaaaattgtatttgttgatttggaatattttttaaaatatattgtattttaagtgaaaaaattgatagataaaattgagtatatattatatatttaattatgtaaaatgggtgtatatttatttttttaataaatatttattgagtgttttaggtattgtggatataggagtgaataaaatattaaagattgttttgttggaatttttattatggtaggtagagaaaggtaatttttaattatatatgtaaaatggtgatatgtgttaggatgaaaatagagtatgggaaagggaatagagtatagtatgttttaggtagagtaatgagaaaggagtttattaggtagagaatagaggagtgttaaggggcgataatgtgaaaaagtttagttaagtttaggtttaggaatttatatgatgttattatttgtatgaagtaaatttatgaaatttcgtatttaaattacgtgatttttttttgttgtataatgattttttttgtgagaaagaattagtgagtaatatgatatgtgatgtttattatatttattttgtagttgaagtattttagaaagttggttgtttagggtatttaattagtagaatggtggataaaattatcgtgtttttgtttttaagttattttttgttagttgagtttttttaaaattaagggagaatattaaatatttatttaatagaattttggttttttttcggaggttgtttatttttggtgtgttttttattttttttgtagatattttttatggataggagttttattgattttgttttttatgttttttaggtaattaaatagttttagtattttgtatttggattgtttaatgatttttttttttttttattgattttattggagtagaaggttaaatataggtatttatttttatattttttaggtttttttatgtagatagagttgttattattagtagacggtgtttataagagagatatggaaaagtggaagaatggaaatagggatttggagtggtgttaaaaataaagaaagaggtttttgaaagttttttatttaatatgattaaatatagaagataaaagatgtaatttaatgattaaggatagggatatagttttgagaaaattatagaagtggaatgaacgttttggattttaaagaagagggaatggaaatgtagttttgaggtagttaaagttaataaagttttttgatatatttattgtagaaataaatgattattttttaatttaaggtttgtaaatttaggtgattataggggcgaggtatggagtggaaatgggtaagagattaagtgggggtagtaatggttttgagtatatagatttaaggggagagattgttgtttggttaatgtttatgattagttagttgaaatatagatttagtgttgttagattttttgattttttgaaagaagttagagattttatatttagtgtaaatagtttaatttttaaattgagtaatttatttaaatatatttatgtaatttatttaaatgtatttagagtatgtttgattttttttttgtatttttatttagttttaggggtaattttaaggaaagtgatgcgtatatttgttgtatttatgtagatggaggattatttttttttttttaataaaagatatttttataaggattgagtgtggtataaagagttcgatttttagtatttaaattgagtaggaaatttaaatatagaagatttttttttgggttatatttttggtttttttaaatgagatttgattttttagatattgataaatattatattattgggttatggtaaatttttaagtggattgatttaaaagtgtttaaaagtattttaggtgttaaggaattgttggtacggagttttaaaggtgtttttgtataagaaatagaggcgttgattatgtatttgatttataaatattttttaaggatatattttgaatttggtaatgaagaaatattgtgggaattattaagttgaataaagtattagttttgttttttagaagtttattgttttatagaggagattagatatgtttatagataatttgaagtatatagtaataaattataggatgatttattttaagtataaagtgtatattgttattatagtggtaatttaggttataatttttaaatgtaagagttttaaatattattttttttatttttagtgatatgaaattatgttagaatatttgtagaaagtttgaattagtaattttaataataaatattgagtattgatatattgtatattattgagatttattttatatatattattttattaatttttatgattatttcggtaagtattaatttttataattaagtagtgatagaaaatgaggtttagagagatatagtattttatttaaagttatagaatataagtagagaatgtagaatttgtattttgggttatttgatagtggagtttagatttttaaaattaggtttataaagattttttggaaaaaaagaaaaataaaaaatagagaataaatttttttgaagaaaagtaggaaattattatttataagtataattaaagagagatttttaattttttttttttttttttttttgagacggagtttcgttttgtcgtttaggcgtaattttagtttattgtaatttttatttttcgggtttatgttataaagaaagtttttatttgattggttcgatttgattgtttattagaatataggttttttagtagggttaataagttataatagttttagtgatataagataaatataaattaataataaggttaatttagaattattaatatatgttttttattgtgaattattagttggtttatagatggaaaatataagatatataatgtattagtttaaaaaatgttttttagagagtgtttagaattatagaatttaaaaattttgttttgaaaaggtttaatttttattttaaaatatataaagaaattaaatgtaaaaaaattaagagaaaaggttttaattaattaaatgttgtataattttaagttttatttatgtttaagattagttttgtaatttatgattaattttagtattagtttgtttttaatttaggtttgttaaataatatagaattttttttttaatgaagttttttagggttttagttgaaaaatatatattagttaggatgtttttaattgtaaggaataaaaagttacgattttattgggtttaaataataatgatatttataattttatataaaatgaagtttaaaggtatggtttattttaggtttaatttttaaggatttacgttttgtttttgttgatttttttttagttttatttttagaggtattttatttatttatggatgtaaaatttttataatagttttagtagaaagattttagtatgataatgtttagggaagaaaattgattatttttttttttgttttttttttaggatgaatttattttttttagggattttttattggaggaagagatttttttatattttattggttaaaattatattatatattgttttaaatttaattattggaaaagggaatggtatttttataattgatttaggatattaggattattttttgggttggggtttgatttaggattttttaaagtatgtgattgagggtaggtattagaatggaattagagttgtgttagaaaggagaaacgtatggttattatagaatagttttaaatgttatcgaggagggtataattgtaaaaattaaataattttttgttatttttttgaagttggtattttgatttttagatggttttttaatataggttttttttttttttattattatagttgttttgaaatttgagttggaagggaatattttgagatttagattgttaaatgttttttttaaagttatgtaataaattaaatggtaaagttagggtagttttttgatttagtatagggtatttttttttattttttatttttgagattttagaattgttggtattgttttaaaatttatggtaagaattggttatttttgtaattaatatttttttataatatatttgttttgtttgtttagttagttagaaattatatggagtttgtgttttaaaaagtttgtcgaagtttttattttttgttttggtattatgtgtatgaattattaattggtttttttttattttatatttgatgaagatgttttttttttaatatttttttttattgttttttatttttttttgttttatttatgattagttgtttgtttttaaatagattttgtggttatttatttttttttgtgttagtttttatttattagttatttgaattgtggtttttattgttttttatatagtttatttatttgtggttgttatatatatttatattgttatatgtttttaaattgtattttggaatgattttggtaatggttgtattggatgagatttaaattaataattaaagtattgagatagtttttgttattataagtttatttttgtttttatagtttaagaggagttattttttttatttttattatttaatgtttaatattatttttattatatataatgtataaaaagtatgtgatttatgatttattttaaatttgaatgtttgtgatttattttgtgtttttttttatttttagg

SEQ ID NO: 174 - DNA, 16579 bp, Artificial Sequence
  chemically treated genomic DNA (Homo sapiens)
tttagaaatgaagaaaaatataaagtaaattataagtatttaggtttaaagtgggttataaattatatgttttttgtgtattgtatgtaataagggtagtattaagtattaagtaataagagtagaagaagtagttttttttggattataaaaataggagtaaatttgtaatagtagaagttattttaatgttttaattattagtttgaattttatttaatgtagttattattaaaattattttagaatatagtttgggaatatataataatgtggatgtgtgtgataattataagtgagtaggttgtatgaagaataatagagattatagtttaagtaattagtggataggagttggtataaaaagaaatgggtgattataaagtttatttagaaatagatagttgattataaatagagtaagagaagatggggagtaatagagaaagatgttgaaagaaaggtatttttattaagtgtaaggtgagaaggaattaattggtggtttatgtatataatattaaaatagagaataaggatttcggtaggttttttaaagtatagattttatgtagtttttagttggttaagtaaataaaataaatgtattataaggaggtgttaattataaaagtgattagtttttgttatgaattttaaagtagtattaatagttttaaagttttaagagtaaagaatgaaagaaaatattttgtattgagttaagaaattgttttggttttgttatttaatttattgtatgattttggaaaagatatttaataatttgggttttagaatgtttttttttagtttaaattttaaggtagttataatgatgaggaggagaagaatttgtgttggggaattatttagaaattaaagtgttaattttaaaagaatggtaaaagattatttggtttttatagttgtgtttttttcggtagtatttagaattattttataatagttatgcgttttttttttttaatataattttggttttattttagtgtttatttttagttatatattttggagaattttgggttaaattttagtttaagggatgattttgatattttaagttaattatagaggtattatttttttttttaatgattggatttggaatagtatataatatagttttggttagtgagatgtgaggggatttttttttttagtgaagggtttttgggaaagatagatttattttgagaagagaataaaggaagaggtggttagtttttttttttggatattattatgttggaatttttttgttggaattgttgtagggattttgtatttatgagtaagtgagatatttttggaaatgaagttgagaaagaattagtaaaggtaaggcgtaagtttttaaggattagatttagagtggattatgtttttgaattttattttatatgagattataaatgttattattgtttaaatttaataaaatcgtgattttttgttttttatagttgaaagtattttaattggtatatattttttagttgggattttgaaaaattttattggaaaagaaattttatattatttagtaaatttagattgaaaataagttaatgttgaaattagttataaattataaaattgattttgaatataaatagggtttggagttgtatagtatttaattaattaagatttttttttttaatttttttgtatttgatttttttatatattttgaaataagaattagatttttttaaaataaaatttttaaattttataattttagatattttttgaagagtattttttaagttaatatattatatattttatattttttatttatagattaattgataatttataatgaaaaatatatgttgataattttaaattaattttattattagtttgtatttattttatattattagaattgttatgatttgttaattttattggaaagtttatgttttagtagataattaggtcggattaattaaatagaaattttttttatggtatgaattcgggaggtggaggttgtagtgagttgagattgcgtttgggcgatagagcgagatttcgttttaaaaaaaaaaaaaaaaaagaaattaaagatttttttttaattatatttataaataataattttttatttttttttaggaaaatttgttttttattttttatttttttttttttttaggaaatttttataagtttaattttaaaagtttgggttttattgttaaatagtttagaatgtaagttttgtattttttatttatattttgtgattttgggtaaaatattatatttttttaaattttattttttgttattatttagttgtgaaaattagtatttatcgaagtgattataggaattgataaaataatgtatataaaataaattttagtgatatataatatattagtatttaatatttattattaaaattattaatttagattttttgtagatgttttaatatagttttatattattaagagtaaaaagaatagtatttggggtttttatatttgaaaattataatttaggttattattatagtagtaatatatattttatgtttggaataaattattttataatttattgttatgtattttaaattatttgtaaatatgtttaattttttttgtagaatagtaggtttttggaaggtagagttagtattttatttaatttaataatttttataatatttttttattgttaggtttagggtatatttttgaggaatgtttgtagattaaatatatgattaacgtttttattttttatgtagaaatatttttgaaatttcgtgttaataattttttaatatttgaaatatttttgaatatttttgaattagtttatttgaagatttattatgatttaataatatgatgtttgttaatatttagagagttaaattttatttaaaaaaattaaaggtgtgatttaggaaaggattttttgtatttgagttttttatttaatttaaatattaaaaatcgaattttttgtgttatatttaatttttataaaagtgttttttgttggggagaggagaatggttttttatttatataggtataataagtatacgtattattttttttaagattatttttaagattaggtaagaatataaggaggagattagatatgttttaaatatatttgaataagttgtataaatatgtttgaataagttatttaatttaaaaattagattgtttatattaaatataaaatttttaattttttttaaaaaattagaaggtttagtaatattaagtttatattttagttggttgattatgagtattaattaagtagtagtttttttttttaagtttgtgtgtttaaggttattattgtttttatttagttttttatttatttttattttatgtttcgtttttgtagttatttaagtttgtaaattttgaattaaaagatgattatttatttttatagtaaatatattagagggttttattgattttagttgttttagaattgtatttttatttttttttttttggagtttaagacgtttattttatttttgtaatttttttaaggttatgtttttatttttggttattaagttatattttttgttttttatgtttgattatattaaatggaaagtttttagaagtttttttttttgtttttagtattattttaaatttttatttttatttttttatttttttatgttttttttataagtatcgtttattagtgataataattttgtttgtatggaaagatttgagagatatgagagtgaatgtttatatttagttttttattttagtgaagttaatgagaagggaagaaagttattgaataatttaggtatagggtattgagattgtttaattgtttgggagatataaaagataaggttaatggaatttttatttatgagaaatgtttgtagggaggataagggatatattagggatgggtagttttcgagagaaagttaagattttattaaatagatatttagtatttttttttgattttggggaagtttagttgataaggggtgatttaaggatagagatacggtggttttgtttattattttgttaattaggtattttagataattaattttttaggatattttagttataaagtggatgtaatgagtattatatattatattgtttattggtttttttttatagaaagaattattgtatagtagagagaaattacgtgatttaggtgcgaaattttatgaatttattttatataagtaatagtattatgtgaatttttgaatttggatttggttaagtttttttatattgtcgttttttagtatttttttgttttttgtttggtgaattttttttttattattttatttaagatatattgtattttatttttttttttatgttttatttttattttagtatatattattattttgtatatgtgattgggaattgtttttttttatttattatagtaaaagttttaatagagtagtttttgatgttttgtttatttttgtatttataatgtttagaatatttagtaaatatttgttaaaagaatgaatatatatttattttatataattagatgtataatatatatttagttttatttattaatttttttatttagaatataatatattttggagaatgttttaaattagtaaatataatttttttatgttatttttgatagttgtatagttttttattaggtggatatagtaatttttatttaaatggttttttatgatgagtttgttatattgtttttagatatttgtttttagaagtaatgttgtaaagaatatttttgtttatttgttttgggtgatattggtattaatatttatttatataataatgtcgagaagtggaattgttgaattaaagagtatatatattttttaaaaatttttgataaagaattaaaaaaaagtgattgttaaattattttttgaagtagaggaatttatttatttttatataatagtatatgagagatttagtttttttataatttggttaatataaatttgtattaaattttttaattttatttttgttaggtatagtggtttatgtttgtaattttagtattttgggaggttgaggtgggtgaattatttgaggttaggagtttaagattaattgttatggttaatatggtgaaattttattttattaaaaatacgaaaattagttaagtatggtggtgggtgtttataattttagttattagggaggttgatataggagaattgtttgaatttggaaggcggaggttgtagtgagttgagatcgtgttattgtattttaatttgagtaatagattttattttaaaaaaaaaaaaaaagaaaaaaattatttttttttgttatttttttgattggtgaaaaaatggtgtagtatattattggtgttttaattattatttatttaattatagatgaggttgagcgattttttttataattttaaaattttatgtttttttttgttattatttgtatataatttttgtttatattttgatagatgtggattttttaaagttatttataaaagtttatggaatattaagagttattagttttttgttttttaaatgtcgtagatgttttttaaatatattatttgtttttgtgtaatttttatttagttagatttattagtattttttagaatggtattgggttttatgttttgtttagaataggtttttttatttttaatttattttttttaattttatgatttttttttattattttgtaaaaagttattttttatattttatatttgatttattttatattttttttaggatgagaaattaggtagagattgatttttattttgtatggatttattaattgttttgaaattatttattgaataattttttttttttattgaatgtttaattttattggagttaatttttgtaatttgttttttgattaatgaaattaaataatttttaaaataatatgtttttttttgatttattttatagatttagtagaaattatatggtttgggtaatgtagttattattaaaattatagaattagattaatatgaattttaagatataatatattattattttttttttgtatagttttttaaagtatttatttttttgatttttataattgtatatttatttaatagattatgatattaaaggtttaaaagtaatatttttgtttggtttttttagttagtgagtttaatttaaattttttgattttaagtttagtgtttattttattatattttaagtaatattaaattaataatttaataataaaaagattataatttattaaatatgtttattgtaaaatatgtaattttattttatagatataaatattttttaaaatttttagaagaatgaggtaggatgtatatagatgtggaaagtatatatatttgtatttttttatagttggtaaatttatttagaggtgtgttttaggaaatagaattgatatattaaataaagattttttgtattgatttttgaaatataattatttttaatatatttaatggtaagaatttagtagtgtttaaaaattttgtatatatatatatatatacgtattttatatatatatatagattttatatatatgtaatttattaagtttaggttataagaggaaattggtaaaaatttattaattgaaatggagtttggttaagatatttatatttaattttttttttttgattttaaattagggagagtatatgttttgtgttttttggtaaaatatagatttatgtaataattagtatatttttttagattagagtaagtaatttttaataatgagtgtttgttagttttaattggtttttttacgtgggtggtgaaaaaatattttattatagttattaatttttttttttaaaagaattatgtgttttgagaagttttgttttattatagggtaatattttattttaaatatagtgtttatcgatgtttgtttatgaatgacgttaataaaaatgtttaaattttattaggaaaggagggtttagttgttagattttgggagatagagttagttgatttttgcgtttttaaaggttttgttatttaattaagtgattaattattaattttaaagtatttaagtttaataatataataaaagagagaataatgggtagtatttttaatattaattatggttatttttggtttagttgtttaggtttttttttagtagaatttataagtgtatagatataggtattttggaatattaaaggtatttttttttagtttgtaaatatagggaaaaagaagaaatttatatttgtaaatttatgtaaatttagggggattttttttaaatttcgtttttttgaaagtaggaaatataatttaaaattaattttgtttttatttattaaaagaattaaaattttgaattttgatataaattttaaatgattgttttgaattttatttcgttttttatttaatttttttataagaagattaaggattgtggatttggtgttggaggaagtaattgtttaattatattggaatttattggaattttttataatattattgcgggtagataatataattttaatatatttttttttttatttagagtttagaataagaagttagatttttggagattttttttttgatgtattgtttttaatatttttaagttataaattgggaatcgtttttattttagaatattaattgttgtttttattggtatttttttatttttatattatatttataatattttattttaggattttatgtgaatatttttaggatgggtttggcgaaattgttaagaagtgtttaaaataattaggttatagtttttagtagataaaaagaaaaagacgtggttgttagttatagaatttgaggtgatggaaaagatttttaaaatttagtttttttaatatgtagtaaaatgggaggatttaaaatgtagttttaagaagtatcgtttcgtttgtattaagtttttttaggtttttagtttagttattttttaaataggtgttgagtttttagttttcgttaggttttcgttaaggttttttattgaggtataggaattttagttatattcgtagtttttttatgtttgtttttatgaaattttattagttttgtcgaatggtagtatttgttattttaggcgaattttttatgatagtttggaacgaaattaatttgttaattgattaagaatgggttttagagtgatttgaatgtatttaaaaagttaataaatggaatacggtataaagttttatttttttgataaaaagtttgtttggagtaaattttaattttttttttgttttaaaataaaagtacgatgttttttttattatttttaagaagtaagtaaaaataaaataaaataaaataaaatttaaatagttttttaataagagtgtttagcgttgtttggatggaattcgggttagttttagaagtagtcggtttcgaatttcgggggcgaggttattcggttttttcggttaagttgggttttgtttttttcgtttcgtttttattggtttcggtgggtgggggtttcggttgcgtcggtcgtttgtgcggttgtattgtagtttttgagtttaggaagttatattcgtttcggttgggagtcgaagcgttaatttacgtggcggttggttaatttagtcgttgcggggagcgttcgttgcgggtttttttttggcgcgaggtgagcgagtgggggcgggttttagatttagtttttttgggcggggttggattattttcgtttgtttagtttttttttatttttttatttcggtacgtttttgtagttatatttgttgtcgttgggaaagggaaaagagtattttaaaacgagtttcgaaatttagatttaaatttcgaaacgaattttttcggttcgtttttggttgtttgaatgttatttgttttattttcgtttttttttttttttttttttttttacggttttttttttttttatttttttttttttttttttttttttttttttattgttcgttttttttttattttttcgttcgacgttcgttttgaagttgaggaagtttaagttttggattaggagttttttttttgtaatattttggggcggggttttatcgttgggtttaagtggttatgggttttgagagtacggtatgtgtattattttttttaaagacgtttagggtggcgcgtttagattttcgaaatttggttttatttcggttatgtgcgttcgtttattaagcggcgaattggatttagggcgtcgcgtgcgttttagtcgattcgcgagaaggtatttttgtattttgtatagattaagatttttttttagggttttttaaatttttagatgtacgtcgtagattgtggagtgtaaaatgaatgatttaagggaaaattagggttttttatttttgaatataaggttgtgaaagatgtacgtttggtttggggggtttgttttttttcgtttgtgcgggatttttttattagggggcgtttatattcgtcgtaaaatttttaatttttagatatttaggttttgtaagttttgtgagttgaattgggggtagattcgaaggagcgtatcgtttttttcgtttttttttttttgttgttttggagtacgggaaaggtagggattttatattagttatttatttgttagttgtgggggaggggacgtagaagttagagagagagaatagaggttgggagaggggaagggaggtagagaagatggagatagagggagatataaagatgaggaacgcgatttagagagattttgtcgcgggtgtgcgcgcggtaggataattttttaggcgtcgtgtagattttttttttttttcgtagtattttttagggatatgtaggatttgtcgagacgtagttggattggagagtaaatagtttaggttatgatattatttttttatttcgtttttttttgtttaatatttagatcgttttacgtttagtgatatagatcgcgggttagaataattcggatgttttaggtttgtacgtattagggatgtcgttttatagcgtttacgtttttgtaggacggtggggcgttttagtcgaggacgtttttcggggttttcggtatacgcgcgcgtcgttgtcgttagatttgttagtaaagttgtttaattagagcggagaattaggagagggtggggaatatgtaaggaaacggaggatttttgtagtttgggcgagaggattgatttagaggtttttgattcgggttttcgagttatttttgtttgtagtgcgttttgggtgtcggtttgtttgttgagatgggagcgatagattttattttattttttagggtgagaaaaattgttgtatatttttgtcgatttagaataggtttttttcgtttaggggttttttagattttcgcggggttttaataattttattttttattttttgttttttttttgttggttttttcgtatcgcgtgtaggataaaagaatttaggggcgtcgggagagaatcgtgatagtttttaagtcgttaaagagatacggcggggattttgtatttttttcggtcggatttttttttagattgtttgcggtttgaaggggttaggttcgcgtaaggttttaggttgtttgggcgtcgggtcgtattgttaggagttgttcgggagtggttttttaggaatattaggtattgattatatattaggggttgggaaattaggtggtttgtattaaggcggtttcggggatttgtttgtggtaagttttggtagtttttatttaaatttttgtttcgagcgtgttaagaataataataataaaaaaattaaagtgttaaaggttttttttttttttttagtttaagaatttattatttttttatgatttttttataatttattttttttttttttttaatttcgttagttattttatttttattttattttgggttttttttgtttgaattttttttaatattaaggtttttttgtatgtttttttttaaaagtttttatgaaagttatttgtattttttaagtgtttatatttttttaatttcgttttatagttttttgttttaattaaagttttttattaattgttttttttttttaagttcgcgggtttttttttataagttttttgtttttgttttttaaggggggaataaaagaaacgtgattattttggaaggcggtttattgtagtttggggggaaaatttattgtagcgttgcgcgattgggttcggcgttgtttaggcgggttatataggaagcgtggtggttcggggaaggatgcggagggtgcgggacggtgttggaagatgcgggaggatgcggggttggtcgaagattttggttttagtttttgtttataatatttaatgttttcggttgttgcgttcgtacgtttggagtttttttttagaaaggttcggggtagttcgtttgtaagtttaaatgcgggttgtgatatttattattattatattattgtatcgttagagtcgaggaggagatttagcgagaagaaggaggagggagaggaggagggtttatttataggttttaaaagcgtttcgtagttttagttatttttaagagtttaggtttggaaagtaggcggaggggcggaaaggtagtttttcgcgtttgcggtagggatcgtttgtttttttttttaggtatttttattttttggcgtttttttttgataagaagtattaatcggtttggggatagtagcgttttttatttagggatttatttagtaatatcgttttgttcgcggaaattattgtttttttattttttttttatttttattttttcgtttttcgtgtagttagttttgggttaggggaaaggagtttttaggtttttagggggtaggttagtaatagataattgagtacgattattttttttcgggagtatataaaattgtaaaattagtaaagaatttggttatagcgtgtttacgcgtttatagagtttgtttgttttattaaagggaagtgttaggtttaaggtttttgttaatttgaaagagatattgagaaaacgagatttttcggggatttagagggaaagtgtaagaattttttattgtatttttagggaattgtttaatggggagttcggttttaaaagattttggtaataaaaggttggataggaaatttttttaggtaaattttttgtcggatttaaagagaatattttttttttgttataaatttttttttatataagtttagattttgtttttttcgtttttttttttttttagtttttttaagtatttttgagtagaatatttgataatttttttgagtaatagggattttttggaagtattaattattttttatgtttttcggaaataagattataattttttatgcgtatatgcgattttttttttttagttaggtttattttattgtgtaaatagtattaatatatggaagagttttttgtattgtgttataaaagatttttaataggattttatagagaaaagggttaaatagttgatataaaggatttttgtttttttagaaaagagggattttggattttttttttttttgaagttaagtatgagtttatataataggaataaaataaatttaaggtgtatattagtataatattagggatattagaatggatggtaaatttttttttttatataaatatgaaagtatttttataatttttttttttgaagtttttatttagaaaattatattaaatataggattttaaaatagtagtgattaaagatgaaagttaatttttttttttaatttttttgattagtttggtttaaatttatgttttaaaatttttagtaatttagatttttgtatatgcgtatttataagattttttttatattttgtaatttgtaggtatttagtatggttattgattttaagtgataaataggtagaagatttgttaggataattttagtttttattatgtgtattttttattttttttgttatttattagttttttgtagtaatataattgttagttatattatttggaaattaatgtgtttttgtagtgaattatttatttttagtaaatttattgtattattattttaaatattgaaatttgattttattagatgtttagaatgatagttatagagtagaattagattttaatttttatgtataatatgtaaataaattaaggtgtagaaagttattgttttaaagttatataattaatagtttagtggtttttttagtgttaattatagtaattttagatttaagattgtttgatttaggaatggagagaaataaaataaaatgaatgtttattgaaatatatattttagatattaagatagatttttttgtgaaatattttaagatgtggatttgtatttttatttttaaatttgagtaaatttagttgagttttaaagagtttaagtaatttgtttaaggttattttgtaagtgatagatttgttagtttgaaaagtttattattttttatttttttgtttttttatgatatagttaagtaaaattttttaataaaggagaattagattagaaataagtaattaatagtagattaatgtttatttttagggaaatgttaatagttaatatttattataaataatgttatttgtatataatggaatatgattgaaagtgatgggttagatattttttatattttgagatgtttttatttatgttgttaaatttgattttttaattttttaaaatttttagttttttttaatgttaatagattttataatatttgattaaatatttttataggataaaggtatttttttagggttgatttaaggaattagaatatgtataatgttgaaaagttttaaattgtttgtttttttttttttttgatttgtaatattattatttagaaaattaaatatttttttaggttattagataattaaaatgaaattatattttatggatattttttttttatttttagggtagatttttttttttagttgtttaaaatggagaatggataaaaaagaaaaaggaaaatatattagttatatttagaatagagtttatagttgtattattatttttatgtaattgtttttaatgatttttttttattaagagaaagaaaatgagagagtatttatttttgattttttaatgtttgataaaattattagaagtttttgaatgggaaaatatatattttttaggttttataattaaaattgtatttatttgtttattatatttaagtatgaattaaatagtaattaaaatattattttgtgagtttttttttaaattatatttttgtattggggatattttttgtgaaaattttaagattttaggtataaataaagtaagatttttatttataatgtttgtgtttaaaagaaattataagttagaagttatgtgttttgtttttttgttttgattttgtttttgggaatttggttgagtttaggggtagtaagttaatgatttggagaggaaaggtgtagatggtagatgtgtttttagggaattttattatttttatttaaatttttttttgaggttttttaggattatattttagatttttttttttttattgattaggtgaagtgtttttagatatggtattatttattgttgttttagggatgataagattttagttttatttaaatttagaaagagtttagttttaattttttgatttgattggttttaggtataattaagtaaattatttttattggatgatatagtaatgttatagattaaaaatgtatttttaatttttaaagattttggaaaaaggaagtttattttttaagattgtgttataattttttttttaaataaaatattgtaaattagggatagatattttatttagtattttgaattttttttggttttttaggaaaggtagaaatataaggtttttattgttttttttttatttttaaaaaagaaattttgtaaaaggtaaagtgatggtggtaattttattgtgttttaattcgaagtatataaattgttttgataaattaaatatagataaatttttttagaaagttataaaatattagattttttttagatattagatattgagtttttgttttttaatttttaaattaaaatgttatagtaaaatatttgttttaataaattttttttttttttgtgttgtaaatgttttgtttatggttgagtagatttttttagaatttaattgaaagattatttatattacgatagaattatgtaagttaaagttaagttttaatatggagtgatgggagaggtcgggttgtcgagaggagatgattttattagtgagaagagaggttttttgagtcggtttttaaggtagttaaatggtttagtatatttgtatttattttgggaggttgtttggagtagagtattaaaaacgttattttttttataaagaaaaagatgaaggtataaagaatatagtttaattaaattgaattaaagattgtattatttttattttttttttagttatttttttaaagttttttttttttttttttatagtttgaaaaatataggttatttttataaagtatttgtttgattgaagtaagataaattgaagagtttggtttttgaatataaggaagcggtagagattttagaattaatgaggtagggcggaatataatgtagaaggttttttaagaggtaaaatttttgtagttgttgtttatttttagtgattattcgtttttatttatttaattagattatagtgggatcgagataaggagtataatgaaagttgttgtattgatggtgtaaaaagatatatggtattattaatgtttttgtggtgagtaaaggtagaacgtaagatagaaaataaggaaatttttgcgttgtaagaaaagtgtttagtatgggtattaatcggtatgtagaagtagtaagtatatattttatttttattttattgataaaaagaattgtaggattaatgtttgtttttattaaaatatgagaaattatattttaattttataaattaaaggttaaatatttgttgtaataattttaaaaaaaagagaagatttgtaagatttagtaaatatttattataaatagattgtttttaattttttatatttttttttaatttaataaaagtttattgagtagtttttatgtgtattgttttagatagtaggtattatttaaaaaagtaataattattttttatttttaaggagtttataatgtttttagaaagaaattaatttattggagtagttaaagttataattgatttataaaatgattagtgaatttagaggaaaattatatataaatatttttgtttttattggttggtttagttagatattattttaaaaaata

SEQ ID NO: 175 - DNA, 6090 bp, Artificial Sequence
  chemically treated genomic DNA (Homo sapiens)
tagagatggaatgtttaaattaggataatttagggaggtgtgggagaggtgtagggggattataagggatggagtaggaatttaaggtagtaatagtagagttggtattaattttaggtttaaaaagataaaggagagagagtggttattaaaatttagaaagagaaaattcggtaaaagacgggatttggtgaggagtagtaatttgtgtttggttgtggattgtggtaattttgtagggaggagagtagaggaatgattattttggttttatttttttttttttttttttattttatgttaggtgttttattggttaaatttattagtaattagaggataaggaatgtattaaaataattttacggtttagagagtagattagatgtagagtgataaatggattatatttagtataatcgtaggtttatttgttgattcgttttttttattagattgagttatttgaggatagagaatgttttttttatatttgtatttttaatatttggtggatattagatatttaagaaatgtttatggacgggattagagaagatggtaaattgggtattagatggaggtttgtgttttttgagtttgtcgtatgttttttggcgaatttaaggtaaaatgagaaatagaatgagttttgtatttttgtttggtaaaagaaaatatgatttggtgagaagaaatgaatatttttagtatttagtgttgggaggaattggaattagttatgtgattgtttttattagaggtttttaattgcgtaacggatagaatttttaatggtgaaattataatgtagaaatatttttttttttttttttttttttttttttgagacggagttttgttttgttatttaggttggagtgtagtggtattatttcggtttattgtaagtttcgtttttcgggtttattttatttttttgttttagttttttaagtagttgggattataggtatttgttattatatttggttaattttttgtatttttagtagaaatggggttttatcgtgttagttaggatgtttttgattttttgatttcgtgatttgttcgtttcggttttttaaagtgggaaatatttttaaaaatattagtttttgataaaattaaagttatgttataaaaaagtaattaaaaggtggaaatgagataatatggtttattttgagttgagaatattttgttagaaaatgattgttttagattttaaatttgattttttatataaatttttagtgtaattttttttgtattatttttttttttattagttaaaagatggaaaggataaattgaggaatttacgttggaggagtatggatttattagatggtagaaatttgggtttttgaatgattattgtggagttgatttttgtttatgttttgtaaatttttgtgttgagagtaagtaatatatttttaatgtgttaaatttttgggatttgttgggttttatagtaatggttattttattttaatacgattgtaaaataatgttttaaaatttatagtcgggtttgtttaaaatattatcgttattattattataatttatagtttatattataattatttttatagaagttttttttaattggtattttataatttgtggttttttatattgttgttttttatgtgtgagatgtttttttgagttttttttgttagggatatgatagaaaataaaatatttaatattttggtgtattttataatgtataaagttttgttttatgtattatttttttagatttttttaataaatttaaggaatatgtaagggtttataattatttttattttataggtgatgaaattgagacgtttatatgtaaagtggaaataattatttatttatttatttatttattaaataaaaatttcgttaatttatttaaagattaattgagagaattattttatttgtttggaatttggtatgtgttaagagaaaagtttttttaatttttttttttaagaagataatttattgttatataataaattattttgaaataatgatttaaaatattaaaagttattgattttgtttatagaatttgaattggaagatataaataattgggagtgagggtggggttggatagttggtttttttgggtatttttcgttttttttgtggttttgttatatgtttttatatggtagttttagggtaattatgatagttgaaggttttagagtgggtggagggggagagggagggagggaaagagagagagagagagagagagagaaagagaagtaagtaggtagaagttttaatgttttatgatttaattttggaaataaattatattgtgttattgttattatttttttttagaagtaagtagatagggttggtgaatatttattgagaggggaattagattttattttttgattgggggagtgttaaagaatttgtgaatatgtttttaaatgattatattttttttttttaaaatgtttgtttaaattggtgtatataaaaagttcgggggttagtgatttatttaaggttattaagttgttaaatggttttattaatattagatttaattttgtgattttaaattttatgtttttttttattattttagataattttcggtgaatattattgtttattagggtagttaagatattttagttgttaaatagatttagtttttttaattgtttcggataatatattttttattttgtagaaaataaatattatttatatggtagttatttataaatattttttaagtttattttaaatatttgtgttttaaatttttttttttaatagatgtatttatttgtatttttttagatgaattattttttttttgttgttgttgttatttttgattgtattttttattttttaagatttttttgtattattaagtttattgtttaagttaatattattttttaatttggggatttttttttgatttttgtgtgttttttttgtgggttattaatgtaatgttatttaagattaggatttggttgggcgtagtggtttacgtttgtaattttagtattgtgggaggtcgagtcgggaggattatttgaggttaggagtttaagattagtttgattaatatggtgaaattacgtttttattaaaaatataaaattagtcgggtatagttatatgtttgtaattttagttattgggtagtttgaggtaggagaatcgtttgaattcgggaggcggaggcggagtttgtagtgagttaagattttataattgtattttagtttgggttataagagcgaaaattcgttttaaaaaaaaaaaaaagattaggatttgatataaggtttgaggggtatttttttgttttgttttgttttgtttttaagaggttaaaatttttatagttgaaaatttttgttgaattatagagatttgaattaatttagtttagaaagtttggggatttgaataacggtatggatcggaaatttttttatttgttagtttttattattttaggtagtaaaatagatttttttttaggagttttttatcgtttggggttttttagtagtgggatgtggggaattaattttttttcgtttttatttaaatattaggtgggagtaaggggtgggaagtagagaaagtggatagaggtttttagtggatatgggatttttgtgtagattagtatagtttttagaaattttatgtaagtaatataggtattgttatattttttagtggttattttttaaaaagtaaataggtgaggtcgggcgcggtcgttacgtttgtaattttagtattttgggaggtttaggcgggcggattacgaggttaagagatggagattattttggtcgatacggtgaaatttcgtttttattaaaaatataaaaattagttgggtatggtgacgcgcgattgtagttttagttattggggaggtcgaggtaggagaattatttgaattttggaggtggaggttgttacgttttattatattttagtttggcgatagagtgagatttcgttttaaaaaaaagaaagtaaataggtgaaattaattttaataatatattttgtttaatttaacgtatttaaaatattattatttgaaagtgtaatgaatataaaaatatttatgagatattttttatttttatatttatattgttttggattttaatgtgtattttatatttatagtataattaatttgggattagttatattttagtttaataatagttaatagtatatgggatagcgtaaataaattttgcgtttttgttgtttttttgggtttcggagattttaattttttttttagattgtaaatttttttgtttttaagtttcggttttaatattagttcggtagaggaatttagtttaatgaggtacgttttttttttgttattttttattttattaatttgtttcgtggtaaacgtaggattgattttttaaaattattttattaattagtttatatatttattatttatttgttttattagaatgtaggttttcggaaggtagggatttaaaaaaatttgttttgttttatgtgatttttttatattaagtatcgtgttcggtataagttgggattttagtatatatttcgggacggaagaatcgtgtttttttagaatttagttagagggtagtttagtaatgtgttataggtggggcgttcgcgtttcgggcggacgtattggtttttcggtcggcgtgggtgtggggcgagtgggtgtgtgcggggtgtgcgcggtagagcgcgttagcgagttcggagcgcggagttgggaggagtagcgagcgtcgcgtagaattcgtagcgtcggtttggtagggtagttcggaggtgggtgggtcgcgtcgttagttcgtttgtagggtttttattggtcgtttgtcggtcgtttttcgtttaaaaggcggtaaggagtcgagaggttgtttcggagtgtgaggaggatagtcggatcgagttaacgtcggggattttgtttttttcgcggaggggattcggtaattcgtagcggtagggtttggggtcggcgtttgggagggatttgcgttttttatttattttttagttgtgttttcgtcgcgtttcggttagttttcggcgttggcgtttatggtcggttttcgatagcgtttcggagggatcgggggagtttttaggcgttcgggtgagtagttaggcgcggtttttcggttttttcgattttcggcgttagtttttgtttttttagttagggcgcggtggggtttgttcgggtagtgtttcgagtaattgggaaggttaaggcggagggaaatttggtttcggggagaagtgcgatcgtagtcgggaggtttttttagtttcgcgggtcgggtgagaataggtggcgtcggttcgattaggcgttttgtgtcggggcgcgaggatttggagcgaattgttgcgtttcggtgggtcgttttttttttttttttgttttttcgggcggtcgtacgtcgggtcggtcgggtaacggagagggagtcgttaggaatgtggttttggggattgtttcgttcggggaaggggagagggtggttacggtgttaggagaggcgcgggagtcgagaggtggcgcgggggtgttatcgttgtcgtaggttggagagagattgtttttagtgaggcgcgtatcgtttgggcgagggttttattttttcgcggcgtttttggaggtgggaaagttgggtgggtatgtgtgtagagaaaggggaggcggggaggttagttattttcggagtcggttttgattttaatagatcgtttagcgtttggggacgtcgatttcggggtgtcgtggtgttcggttttacgcgcgcgcggggttgaggggtcgggggcgtttttggtcgtttagttttaataaagggtgtttttttttatttcgcgaggaggggtagtttcggagattcggtttttagcgagcggggttttagcgtcggggaggtttatttttttttggggttgttattttattattattattgttttttttttttttttaaaagg

SEQ ID NO: 176 - DNA, 6090 bp, Artificial Sequence
  chemically treated genomic DNA (Homo sapiens)
ttttttgaagaaaaaaaaaaggtaataataatagtaaaatggtaattttaaaaggaagtagattttttcggcgttaagatttcgttcgttgaagatcgggttttcggagttgttttttttcgcggggtggagaggagtattttttgttaaagttgggcggttagggacgttttcgattttttagtttcgcgcgcgcgtggggtcgggtattacggtatttcgaggtcggcgtttttaaacgttgggcggtttgttgggattagaatcggtttcggaagtgattggttttttcgttttttttttttttgtatatatgtttatttagtttttttatttttagggacgtcgcggaagaatgaagttttcgtttagacggtacgcgttttattgggagtaatttttttttagtttgcggtaacggtggtattttcgcgttatttttcggttttcgcgttttttttaatatcgtggttatttttttttttttttcgagcgaggtagtttttagagttatatttttggcgatttttttttcgttattcggtcgattcggcgtgcggtcgttcgggggagtaagggagggaagggagcggtttatcgaggcgtagtagttcgttttagattttcgcgtttcgatataaagcgtttggtcgggtcggcgttatttgtttttattcggttcgcggggttggggaagtttttcggttgcgatcgtattttttttcgaagttaagttttttttcgttttggtttttttagttgttcgaggtattgttcggataaattttatcgcgttttggttgggaaagtaaaagttggcgtcgggggtcggggggatcggggagtcgcgtttggttatttattcgggcgtttgggagttttttcggttttttcggagcgttgtcggaggtcgattataggcgttagcgtcggagattagtcggggcgcggcgggaatatagttagggagtgagtggggggcgtagattttttttaggcgtcggttttagattttgtcgttgcgagttgtcgagtttttttcgcggagggaataaagttttcggcgttggttcggttcggttgttttttttatatttcgaagtagtttttcggttttttgtcgttttttgggcggagggcggtcggtaggcggttaatggggattttgtaagcgggttggcggcgcggtttatttattttcgagttgttttgttaggtcggcgttgcgggttttgcgcggcgttcgttgttttttttagtttcgcgtttcgggttcgttggcgcgttttatcgcgtatatttcgtatatatttattcgttttatatttacgtcggtcggggagttagtgcgttcgttcggaacgcgggcgttttatttgtgatatattgttaagttgttttttgattgggttttagggaaatacggttttttcgtttcgagatgtgtattgggattttagtttgtgtcgggtacggtgtttggtatgggaaaattatatagaataaaatagatttttttaaatttttgtttttcggaaatttgtattttggtgggatagatagataataaatatgtaagttaattaataaggtaattttggaggattagttttacgtttattacgaaataggttaatggaatagagaatggtaggaagggagcgtattttattagattgggtttttttgtcggattggtgttggagtcgaggtttgaaggtaagaaggtttgtaatttgaagaaagggttgaggttttcgagatttaaagaagtaatagagacgtagagtttatttgcgttattttatatgttattggttattgttgagttgaaatgtagttagttttaaattaattgtgttgtaagtgtaaaatatatattagagtttaagatagtatggatatgagaatgaaaaatattttatgaatatttttatatttattatatttttaaatgatagtattttggatacgttgggttaaataaaatatattattaaaattaattttatttgtttatttttttttttttgagacggagttttattttgtcgttaggttggagtgtagtggagcgtggtaatttttatttttagggtttaagtgatttttttgtttcggtttttttagtagttaggattatagtcgcgcgttattatgtttagttaatttttgtatttttagtagagacggggttttatcgtgtcgattaggatggtttttattttttgatttcgtgattcgttcgtttgggttttttaaagtgttgggattataggcgtgacgatcgcgttcggttttatttgtttattttttaaaaggtggttattagaaaatataatagtatttatgttgtttgtatgagatttttgaggattgtgttggtttatataaagattttatatttattggagatttttatttattttttttattttttattttttgtttttatttaatgtttgggtggagacgaagaagggttgattttttatattttattgttggagaattttaaacggtgaaaagtttttaaagggaaatttattttattgtttagaatgatgaaaattgatagatgaagagattttcgatttatatcgttgtttaaatttttaggttttttaaattgagttggtttaaatttttgtggtttaatagaaatttttaattgtgaagattttggttttttgaaaataaggtaaaataaaataaaagaatattttttaggttttatgttaaattttagttttttttttttttttgagacgggttttcgtttttgtggtttagattggagtgtagttgtgaaattttggtttattgtaaatttcgttttcgtttttcgggtttaagcgatttttttgttttaggttatttagtagttgggattataggtatgtgattatgttcggttaattttgtatttttagtagagacgtggttttattatgttggttaggttggttttgaatttttgattttaggtgattttttcggttcggttttttatagtgttgggattataggcgtgagttattgcgtttagttaaattttagttttaaataatattgtattaatgatttataggaagggtatataggaattaaggggaagtttttaaattgggagatggtattagtttaagtagtgggtttgataatataaaagggttttgagaggtgagaaatatagttaaaaataataataataataaaaaaagagtgatttatttgggaaaatgtaaatgaatatatttgttgggagaaaaaatttaaaatatagatgtttgggataaatttggaaggtgtttatggatgattgttatatgggtaatatttattttttgtaaaataaaaaatatattgttcgaggtaattaaaaggattgaatttatttggtagttagaatgttttaattattttaatggataatgatgtttatcggagattatttggagtagtgaaaaagagtatgaaatttggagttataaaattagatttagtattggtggaattatttaatagtttaataattttggatgagttattaattttcgagttttttgtgtatattaatttagataagtattttagaaaggggaaatgtggttatttaaaaatatatttataaattttttgatatttttttaattaagaggtggagtttaattttttttttaataaatatttattaattttatttgtttgtttttaagaaaaggtagtggtagtggtatagtgtaatttatttttaaggttaggttataaggtattagagtttttgtttgtttgtttttttttttttttttttttttttttttttttttttttttttttttttttttttttatttattttaaagtttttagttgttatgattattttagggttgttatgtagagatatgtgataaaattatagaaagaacgagagatgtttagagaagttagttgtttagttttatttttatttttagttgtttatattttttagtttaagttttgtgagtaaaattaatgatttttaatgttttaagttattattttagagtggtttgttatgtagtaatagattatttttttaaaaagaaaaattaagaaaattttttttttaatatatattaggttttagatagatgaaataatttttttaattaatttttaaataaattagcggggtttttatttaataaataaataaataaataagtggttatttttattttatatgtaaacgttttagttttattatttgtgaaatgaagatgattatagatttttatatattttttgggtttgttgggagaatttaaagagataatgtatgaaataggattttgtatattataaaatatattagaatgttggatattttattttttattatgtttttagtaaaaaggatttagagaggtattttatatatagaaggtaataatataagaagttataaattatgagatgttagttgagaaggatttttataaaaataattatgatatggattatggattataataatgatggcgataatattttaaataaattcgattgtagattttagaatattattttatagtcgtattagggtaaaataattattgttataagatttaataaattttagaggtttaatatattaaaaatgtgttatttgtttttagtataaaggtttgtagggtataagtagagattagttttatagtagttatttagaaatttaggtttttgttatttaatgaatttatgtttttttagcgtaagttttttagtttattttttttattttttggttgatgagagaagagataatatagggaggattgtattgaaggtttatgtaggaggttagatttgaagtttgagataattattttttggtaagatgtttttagtttaaagtggattatattattttatttttattttttggttgtttttttgtaatatggttttggttttattaagggttaatatttttaagaatgttttttattttgggaggtcgaggcgggtagattacgaggttaggagattaagagtattttagttaatacggtgaaattttatttttattaaaaatataaaaaattagttaggtgtggtggtaggtgtttgtagttttagttatttgggaggttgaggtaggagaatggggtgaattcgggaggcggagtttgtagtgagtcgagatggtgttattgtattttagtttgggtgatagagtaagatttcgttttaaaaaaaaaaaaaaaaaaaaaaaaaagaatgtttttgtattgtggttttattattaaagattttgttcgttacgtagttgagagtttttgatagaggtagttatatgattgattttagttttttttagtattgagtgttaaaagtatttatttttttttattaaattatatttttttttattagataaaagtatagagtttattttgttttttattttgttttggattcgttagaaagtatgcggtaagtttagaaagtataaatttttatttaatgtttaatttattattttttttgatttcgtttataagtattttttgagtatttagtgtttattaaatgttagggatatagatataagagaaatattttttgtttttaggtaatttagtttgatgagggagacggattaataaatagatttgcgattgtgttaaatataatttatttgttattttatatttaatttattttttgagtcgtaagattattttaatgtattttttgttttttggttgttggtaggtttagttaatggggtatttgatatgagatgaaggagaaggaaggagagtgaagttaagatagttatttttttgtttttttttttgtaagattgttatagtttatagttaaatataggttgttgttttttattaggtttcgttttttatcgggttttttttttttgggttttggtaattatttttttttttttgtttttttgagtttagggttggtgttagttttgttattattattttgggtttttgttttattttttatggtttttttgtattttttttatatttttttgaattgttttaatttgagtattttatttttg

SEQ ID NO: 177 - DNA, 6274 bp, Artificial Sequence
  chemically treated genomic DNA (Homo sapiens)
ggattatttgagtttgggaagttgaggttgtagtgagttaaggttacgttattgtattttggattgggtaatagagttagattttgttttaaaaaaaagaaaaattttatggttttgtttatattatttatttgattttatatgttgtttattttttttattaaaatttttagtttattaattatagtttttttataattaatatttcgatgtgataatgttttagtttaattattgtggttataatagaatgttataaattgggtgatttataaataaaagaagttgatttaggttgatttagaggttggggagtttaagagtttggtgttagtatttgatgagtgtttttttgttttattataatatgggagagggtattacgtgtgaagagagtttatttttataatatagttatttttataagaattaatttatcgttatgagagttatgtgaatttatttatgaggatagcgggttaagtttttaatatatggatttttcggggatatatttaaattatagtagttagttgtaacgttcgtgttatgttttattttggttttgatgtttgtgtagtttttttaaattgcgtttttgttttttagtgtgttttgtaatgtggaaatgatatattgggtaagaggagttgtagtaaagaggtttttagtgacgtagtgataagttgtggggagagggagtgttgtatagttttgtcgtatgttatagttttttagtgagtttgtgtttttggattgtgaattttatgtttgttttttagtttttttagttttttagatggtatagaattgttggaggggggtggagttgtatattttttttgttttgggtaggttattttttgataaaatattaggttaggtttttggtgaaataattttttttgagggtagattttttattaataatagaatgttttaatttattttaaaatggttttttttttttttttattgttagaagtataatgagattttttttttaatattcgtggtaaggatttagtagagttttaggaggtaatatttttaagtgttttatattattttgtattatgattgggttttgttggagtttttaatttgtagaattgtttatattgagtttttcgtaattttttaattatagggtaaatttttttagtcggtattgggtttttggaggtttttgtttgttggtttttttttttggaggttgtgtttttgtgtttgtttgtttttttaatttggggggtagtggtttgtttaatgattttaattttttgaaagagttaagaagaggtgttaatttttcggtttgtttagttttttatttgttgttagaatggagcgttaatagtgttttttatagtgatatgtaatttttaattttagagatgatgaagtatattaatgataaaggagaaatgttttagtagttttttgttagtatattattttttgaaaaagttgttttttttatattttgtaagagatgggttttaatttagagtttaaggtaaatgattttttttaaggagaaggaataaatagttttagaaattatgaaagtttgtttttaggagtgtttttgaattttagtaggggttatatttattttgtagaaataggtgaggtatgtttttggtataaaattttaatggtatagaaggataaattgaaaaataagtttttttttaaatttttgatttcgagttatttagtttttttttttagaggtaaagttgttattagatttttgtatttttttaatatatatttttagaagagttgttaagtgaatatatgtttaagtgaaaatttattttagaagtgtatttttttaaggaattttagggttggaaggaatttgtgttagtttttaatttataatttttattagtatttattgtttttgtataaaaattttttttaaaaaagttttttttattttgatatagtttattttatttttatttagttttaataatttataaaatatatttttgaaagtttaaaatttgttattatgttttttttttttaattaatttttattttgatttttaagttagagaaaataggtggttaaatgttttttgtttaagatggaatttagaatatttgaagattttagatttttattttgttaaataacgtgttttttttttttttttatagagtatttggttttaggaaatttagagttatattttttatagataagattaaatttttatttaatatatttagaaattttttttaagaggataattatttattagaggaaaaaagttttttatgtatagttggtaaagggatggaattatttgtgttattaaaattgatagacgtttatgagatttattaagggaaatattagagttttagtatatatttgttaatatagtatatatgaaggttttatttataatttttttggttaagtagaaattttggtattatttattttaataaatttttaagatattatgaaatagaattttaggttttgatattattatttgttttaggttttgaagcgttgttggataagaggggtaaaatacggttttgttttggatttaaagttggttttttatattagtaagtatattttggtattttggttatttttttcggttatagtattatattgttataaaaggtagatataagtattaattagtttataggttattagataagtttagtttgattaatgtttaatatagtaattgggttattattgttatttttgtggtggtggtatatatatttagtttttgttcgggttatggtttaggattattttttatagaggttgtgagttagagttttaattgtgtagggttttaattatgttaggttatttattttttttaagaggattttattagtgtttgttcggttatatagttttttatttattaagtaatatagttattagtatattttaggtattagttaaggattataaaattaacgtgaatgttagtttttgtattaaaagtttaaaggagaaatttaaattttatatagatgttttatgaagatgtttagtaaatttatttttttttgttttttggaatttattttagtattgtgttatgtgtgtgtttagtaattttttataaaaagttttgttttttgtgatgttattagattatattgaagaatatataagtcgtattatgaaggttgttgttttatatagttttaacgtagtgagaattgatgtttttatatgttgtttttttgggtatttaaagaaatttttgtatagttttataaattagttgtagtttaaattgatttgtgttgtgatttgtatatataggttatatttttttgatagaaaatatagtttaaaattaaatttgtagtttttgttaagtgaatgtataggattttattgtatttaggttttttattgtaagatttatttttgtttttattttatgttttattgttgtgttttttatttgtttttttttagttttgttttttgtgtttttacggattgtttttagtttaggtgtgtaggaagtatatatatgtttgtagagtttttatggtttttgtatttagggtatgattttaacgtatagtggttgtattgatttgttaaaataaaggaatagattattttttttaatttatagggaagttttaggttgtgcgggtagtgagtagatttgtgtttgtttgcgtttgttttggtgaaaaattttatcgtttaggttgtagggtgcgagatttaggtataaatattttgttggatgaggaggaaagatgtaaggttgtttttttttagagatagtaaagggtaggtttgtagttttatttattttaggattgtgatttttgatagagtcgagagattagggttgttgaattaggtttgaaggttttagtgaatttcgtgaagagaggaggggtttggttgtaatatggatttagaggatatttttattgtaggagaaggaatagtggggatggggtggatttgttaaaggaatatagtttaagtttttgtagtttaaaaaagtttagttttttttggttaaagttttcgcgagtttttttggtattttttttgcgggagttataggggtagtgggatatttagtttttttaaaagtatttttacggttgtttgtgttaagtttttattttaagagttttatttttgcgaagtaatgtgttttatatattggttttaaagtatttatggttggttgtaataaatattaaggaggtttgtttttgtattcggagttgggtgtttttattttagatgatttcgagggtgtttgataagatttgaaggattttcggattttagagtattatttcggacgtttggtatttttgtcgcgcgggtacggcgatttttttagttgttaggttagtttttgattttcgagagggtttcgtagtgttgtaggggaggtggggattcgaataaaggagtagttttttcgtcggtgttattattcgacgttggttttaaggttcggttagtttgtttaaagttggtataagtttgttttgtaaaataaaagaagggaaagggggaaggggattttggtatagatttggttcgatttggatataggttgggtttgtaagttcgcggggatcgggtttagaggggtagtgttgggaacgtttttttcggaaattaattttttagggtattcgttttttttttatgcgtcgttttattttcgtcggagattaggtttcgcgggggttatcgttgtttatcgttttcggcggtcgttggttttgggttttcgttgttggtttttttttttttttttcgtatttttttttttttttgtttttttcgatttttttttcgtcgtttggtttttttttttttcgttttgttttttcgcgtttcggttcgcgcgagttagacgttcgggtagttttcggcgtagcgcggtcgtagtagttttcgtttttcgtacggtgtgagcgttcgacgcggtcgaggcggtcggagtttcgagttagtttcggcggtcgtcgtcgtttagatcggacgataggttatttcgtcggcgttcgttcgagttttcgtttcgtcgttaacgttataattatcgcgtacggttttttgatttcgtttagtattgatcgggagagtcggagcgagtttttcggggagtagcgatgcgatttttcgggacggtcggggtagcgtttttggcgttgttggttgcgttttgttcggcgagtcgggttttggaggaaaagaaaggtaagggcgtgtttcgtcggttttcgcgtcgttttcggatcgcgtttcggatttcgtagttcgtttaatcgcgtatcggcgtatcggttcggcgttcgcgttttcgttcgtttttttttgtttttttgagattagttgcgtcgtcgatcgggatcgcgggaggaacgggacgtttcgtttttcggtcgggagagtttggggcgggcggaggaggagacgcgtgggatatcgggttgtaggttaggcggggaacggtcgtcgggattttcggcgtttcgaatcgtttttaattttttttttttatttttttcgtttagttgcgtaggatcggcgttagtgggcgaaagtcgggtgttggtgggcgtttggggtcggggtttcgtacgtgcgtttcgcgttgtttttttagggcgcgacggggttttggcgcgtattcgaggggcgggcgttgtttattcgtcgagattgtattgtttagggaagttgaggaaggaatttaaaaatatagttttttttcggatttcgcgggataggcggttttttgagaggattttttcgttttcgtttttcgcgtaggttttaaattgaagtcggcgttcgttagtttggtttcggtttttttttaggttttcgcgattttcgttttttagtgtggagtcgtagtttcgatttgggagttgggagaattcgtttattattatttgcggttttcggggaggggtggtgttggcggcggttagttttttcgttggtaaaaggtaggtggggttcgattcgttttttgggcgtagatttcggtcgttcgtttcgttcggtgcgttttcgttttgtttatttaagagtgttttttatttttcggggattttagtttttttttgggcgttcgcgtcgaaagttttaggttttttttcgatggtcgtttcgcggagacgttcgggtttgttttatttgtagtttttcggtcgcgtttgggtttcgcggtggagcgggacgcggttgt

SEQ ID NO: 178 - DNA, 6274 bp, Artificial Sequence
  chemically treated genomic DNA (Homo sapiens)
atagtcgcgtttcgttttatcgcgaagtttaggcgcgatcgaagggttgtaggtggagtagattcggacgttttcgcgaggcggttatcgaaggagagtttggggttttcggcgcgggcgtttaggagggagttggggttttcgggaggtggggggtatttttggataggtaagacgagggcgtatcgggcgaggcgagcggtcggggtttgcgtttaaggggcgggtcggattttatttgttttttgttaacgaggaaattaatcgtcgttagtattattttttttcgggagtcgtaggtggtggtagacgagtttttttagtttttaggtcgaggttgcgattttatattggggaacgaggatcgcggggatttggagaggggtcggggttaggttggcgggcgtcggttttagtttgagatttgcgcggagggcggaggcggggaggtttttttagaaagtcgtttgtttcgcggggttcgaggggaggttgtatttttgggttttttttttagtttttttaaatagtgtagtttcggcgggtgggtagcgttcgtttttcgggtgcgcgttaggatttcgtcgcgttttgggaagatagcgcggggcgtacgtgcgggatttcggttttaggcgtttattagtattcggttttcgtttattgacgtcgattttgcgtagttgggcggggaaagtgagggaagaaagttgggagcggttcggggcgtcggaggtttcggcggtcgtttttcgtttggtttgtagttcggtgttttacgcgttttttttttcgttcgttttagattttttcggtcgaagaacgaaacgtttcgtttttttcgcggtttcggtcggcggcgtagttgattttaaggaaataggaaaggacgggcgggggcgcgggcgtcgagtcggtgcgtcggtgcgcggttgggcgggttgcggggttcggggcgcgattcgggggcggcgcgggagtcggcgagatacgtttttatttttttttttttttagagttcgattcgtcgggtagagcgtagttagtagcgttaggagcgttgtttcggtcgtttcggagggtcgtatcgttgtttttcgaagagttcgtttcggttttttcgattaatattggacggagttagggggtcgtgcgcggtggttgtggcgttggcggcgaggcggggattcgggcggacgtcgacgaggtggtttgtcgttcggtttgggcggcggcggtcgtcggggttagttcgggatttcggtcgtttcggtcgcgtcgggcgtttatatcgtgcggggggcggaggttgttgcggtcgcgttgcgtcgggggttgttcggacgtttagttcgcgcgggtcgaggcgcggggaggtagggcgggaggaggagggattaggcggcggaggagggatcgggaggagtagaggaggaggagaatgcgaggaggagggaggagaattagtagcggggatttaaggttagcggtcgtcggaggcggtggatagcggtggttttcgcgggatttagttttcggcgggagtggggcggcgtatgggaggggagcgggtgttttgaggagttaattttcgagaggggcgtttttagtattgtttttttggattcggttttcgcggatttgtaggtttagtttatgtttaggtcgagttaaatttgtgttagggtttttttttttttttttttttttttgttttataaagtaaatttgtattagttttagatagattggtcgagttttagagttagcgtcggataatggtatcgacggggaaattgtttttttattcgggtttttattttttttgtagtattacgggattttttcggggattagaggttggtttggtagttgaggaggtcgtcgtgttcgcgcggtaggggtgttaggcgttcgaggtggtgttttaaagttcgagggttttttagattttgttaagtattttcgaaattatttgaaatgagggtatttaatttcgggtgtagagataggtttttttaatgtttattgtaattagttatgggtattttgaagttaatgtgtgaagtatattatttcgtaaaagtgaagtttttggaataaaggtttgatataaatagtcgtggaggtgtttttagagaggttaagtgttttattgtttttgtagttttcgtaggagaaatgttagggaaattcgcggaagttttggttaaaagaaattgagtttttttgggttgtaggaatttgagttatatttttttggtaagtttattttatttttattgtttttttttttgtagtaaaaatgttttttaggtttatgttatagttagattttttttttttttacgagatttattaggatttttaggtttggtttaataattttgatttttcggttttgttaaaaattataattttgaagtaagtgaagttatagatttgttttttgttgtttttgaaggggagtaattttatattttttttttttatttagtaaaatgtttgtgtttgggtttcgtattttgtagtttgaacggtggggttttttattagggtaagcgtagatagatataggtttgtttattgttcgtataatttggaatttttttgtgaattaggagaagtaatttgtttttttgttttaataaattagtatagttattgtgcgttgaagttatgttttgaatgtagaggttatgaaggttttgtaggtatgtgtgtgttttttgtatatttgggttgagagtagttcgtagaaatatagaaaataaaattagagaaaggtaaatgggaagtataatagtggaatataaaatgaagataggagtgagttttataataaaagatttgaatataataaagttttgtgtatttatttaataagggttgtaaatttggttttaaattatattttttgttaagggaatgtgatttgtgtgtataagttataatataaattaatttaagttataattgatttgtaagattgtataggaatttttttgagtgtttaaaaagatagtatgtaagaatattagtttttattacgttaggattatatgagataatagtttttatagtacggtttgtatattttttaatgtgatttgatagtattataagaaatagagttttttgtaaagaattattagatatatatatagtataatattgggatggattttagggaatagagaagaatgggtttgttgaatatttttatgggatatttatgtaaagtttgagttttttttttgagtttttgatataaaagttgatatttacgttgattttgtagtttttggttagtatttggagtgtgttgataattgtgttatttggtaagtaaaaaattgtatggtcgagtaggtattaatgaagtttttttaagagagataagtagtttggtatagttagggttttgtatagttagggttttagtttatagtttttgtggagggtggttttagattatggttcggatagaggttgggtgtgtgtgttattattataggaatgataatagtggtttagttgttgtgttaagtattggttagattaagtttatttgataatttgtgagttggttaatatttgtatttgttttttatagtaatgtgatgttgtggtcgggagaagtgattaggatattaaggtatatttgttagtatgagaggttaattttgaatttaaggtagagtcgtgttttattttttttgtttagtaacgttttaaaatttgagataaatggtgatgttaggatttaaaattttattttataatgttttggaaatttgttagggtgagtaatattaaaatttttgtttggttaaaaaaattatagataaagtttttatgtatgttatattagtaagtatgtattaagattttagtattttttttaataaattttataagcgtttgttaattttaataatatagatggttttatttttttgttagttgtatatgagaaattttttttttttgatgagtggttatttttttagaagaagtttttgagtatgttgaataagagtttagttttgtttataaggaatgtggttttgaattttttaaaattaaatgttttgtgaaaggggaggagaaatacgttatttggtagggtgaagatttgaggtttttaaatattttaagttttattttaggtaaaaggtatttgattatttgttttttttggtttagaggttaaagtaaagattgattaggaaaaaaaaatatagtggtagattttagatttttaaaaatatgttttataagttattggagttaagtaaaagtagaataagttatgttagagtggaaagggtttttttgagaaagatttttgtgtaagaataataagtattaatggaggttgtgaattaaggattgatataggttttttttaattttaaagttttttaagaaaatgtatttttaaaataggtttttatttaaatatgtgtttatttgatagtttttttaaggatatatgttaaggagatataagaatttggtaatagttttgtttttagggaggagaattaggtagttcggggttaggggtttagagggagatttgttttttaatttgtttttttgtattattgggattttgtattaggagtatgttttatttatttttgtaaggtaagtgtggtttttgttgaggtttagggatatttttgggggtaggtttttatggtttttgagattgtttattttttttttttgaaggaagttatttgttttgagttttgagttgagatttattttttgtagaatgtggaagaagtagtttttttaaggggtaatgtgttgatagaaaattgttgaagtattttttttttgttattagtatgttttattatttttagagttgagggttatatgttattataggaggtattattggcgttttattttagtaataagtagaaagttgagtaaatcgaaaaattaatatttttttttagtttttttagagaattgaggttattgggtaaattattgttttttaaattggagagataggtaaatatagaagtataatttttagaggaagaaattagtagatagaaatttttaaggatttagtgtcggttgggaaagtttgttttgtaattgagaaattgcgggaggtttagtgtgggtagttttgtaaattaagaattttagtagagtttagttatggtgtagggtagtatgagatatttgagagtgttattttttggagttttgttaggtttttattacgaatattagggggaaaattttattatgtttttggtagtggaaggagaagaggaattattttgaaataggttggaatattttattattaatagaaggtttgtttttaggagaaattattttattagaggtttaatttggtgttttattagagggtgatttatttagagtaagggaaatatataattttatttttttttaatagttttgtattatttaaggggttggggaagttgagaagtaagtatgaagtttatagtttagggatataggtttattggaagattgtgatatgcggtaggattgtgtaatattttttttttttatagtttgttattacgttattagaagtttttttattatagttttttttatttagtatattatttttatattgtaaggtatattaaaaggtaaagacgtagtttgaagagattgtataagtattagaattagaatgagatatgatacgaacgttataattaattgttgtggtttgaatgtgttttcgaaaagtttatatattggaaatttaattcgttgtttttatgaatgaatttatatggtttttatggcggtgggttaatttttgtgggagtggttatgttataagagtaagttttttttatacgtgatgtttttttttatgttatgatgaagtaagaagatatttattagatgttagtattaagtttttggattttttagtttttaaattagtttaaattagttttttttgtttataaattatttagtttgtggtattttgttataattatagtaattggattaagatattattatatcggagtattaattataaaaaaattatgattaataggttaggagttttaatggaaaaaataggtaatatgtaagattagatggataatgtaagtagagttatggaattttttttttttttgagatagggtttggttttgttgtttaatttagagtgtagtggcgtgattttggtttattgtaattttaattttttaggtttaggtgattt

SEQ ID NO: 179 - DNA, 3000 bp, Artificial Sequence
  chemically treated genomic DNA (Homo sapiens)
atatttaaattgtatatttggtttgtaatatattatatatttaaaagaattattatttttttgaatattattaatattaataatagtattatagtgattaagagtggatttaaataaaggttggtttgaaatttaggtttgttatttattagtaagtttttaaaaattttgagtttttagtttttttatatgtgaaatggagaaaataaatttgtaaaattaattaaatttgtttatttatatttttttttttagtgtatattaattggtatttttcgttaggttagaatgtgtttttaattatgttttaaattcgttttgtgttaattttattgttagaattttttttattttgagaattagaaaaggaaatattatgtttggtaatgtttatattttttaaaataaatttgtaggaaagaatatttagtaagtgatgagagtagtaacgattgtttttattattttaaatttataatattattttttttagagttttttaagtattgtagataattttttatttattaaaaaataaattgtaattataagtatttagggttgatattgtttttgaattagatagtgtttatattagttgtataagattaatttaaagtagaggatgaaattttttttttgaattttttttagaacgtaatttagtgaatatattaaaattaaattttttttgaatgggagtaatttttacggattaatttgtaattttttagattatatttaaggtaatgtagaggttgttgtattataggttttgtgattagagattattggatttgtttttggaaaagttatttatgattttttgggttttggtttttttattttttatatcggtttaataatgattatcgtagagttgttatggaagttaaatgaatttatgtattataagtgattaatataatgattgatatttagtgatttattaataaattaaaatatttattattaatatgatagagaaggtgtcgttaaaatagataataggtttttggaagaggtgattaaatggatgtaaaatttatggattgtttatttcgtttatttttgttgtgttttttggttgtggtatatatacgtgtgggtataaaatcgtaaattttatgtagtcgcgtagtgtatgcgtagaaggtttagatacgaaatgttattttagtaatgtgtttagagaagttttgacgtcgttttggaagtaagtcgttgttgtttgatttttgggcgtttgggacggatgtttatatttgtatttagtagtattggaaggggtttaggtttttcgtagtatagtttatttttagatcgtttagttttttataatatatatttttacggaaaagggtattttttttcgttagaaaaagcgttttagtttggtttgggttggtttttattttacgttgttgtaagtaggcgaagttttttttgtttttttttttggggtaagtggaaaggagttcggtagggggttcgtagtggtttgtataggggaattgggtagcgagagagttttaggtaatttcgggggttgttttatagaagtaggtggggatcgatagtggtttttcggtttagggaggagagcgcggtcgcgggtttttttttttagtttggaggttgtagtcgttcgagtcggttcgggtgggggcggggtgggggcggcgcggagggtacggagattacggcggcgttattcgggatatttagggtttcgaggttttgggcggtttttacgcgagatcgtaaattatgataataggtagttattcgaggttaaataaaaacggagtgggtttttcgcgcgtcgtcgtttttcgcgtttttggcggtttttttcgaggttttcggcggttttacgagttcgtagtagtcggtggcgacgtcgttttcgttttatttttttgcgtaagtgcgaggttgtcggtagcgcggcgtacgtttcggtcgttttcggttttcgcgtaaaatttttattttgtttacgtgaagttgtcgttgttttagagagggggaaagagttgcgggaaaagtcggggagtgacgattgcggcggttgggcgcgtttttttattttttttttttttttttttttttttgtcgtagttcggagttttggttttttttttttttttttttttttcggagtcggttttttttttcgtttcgtttttttttcgtttgtgtacgttatttgttgtggggtggtcgaaggggatgttttgtttttattagaggtatagcgcgaaggggaaatttcgatattggaaggaacgagaataaatatttaattacggacgtattgaatcgcggttgggatagatatttcgggaattcgaggcggatcgggcgacgaggtgagtgatttttttttttaattttcgttttagggttttcgggggagtttgagttgagagaatttttaaatttttcgggaaagtgcgcgaggtttcgtcggggacgtcgagcgttgggtattgaggacgcgtagttggacggtgcgtgggcgtttgcgttttcggggggcgtttggaggtcgggtgttttacgtttgagggttcgggtcgttcggatcgtagcggtgttttttgttttagaagacgtttttaagttttaagggtttttttcgagtttgtttgtttttttcggggtcggcgcggagtttgcgcgtaacggagtttatttagtagtttagcgcgcggtttttatttgtatttcgtttttatttggtagaggcgcgagtatcggggttttttttatattttttttatgacgtgtattattttttgatgattttttagatggtttaggcgcgaggatgttgatttagagtttttcggagggttataggcgtttgggttttttcggtgtcgggtgcgtgtgtattttaaaggttcgcgttttaatttttaggtattgatcgggttttttaattgcggcgattttattttaatagtttttatgtggcgtggattgaatgtt

SEQ ID NO: 180 - DNA, 3000 bp, Artificial Sequence
  chemically treated genomic DNA (Homo sapiens)
gatatttagtttacgttatataaaaattattaaagtgggatcgtcgtagttgaaaagttcgattagtgtttggagattagaacgcgagtttttaaagtatatacgtattcggtatcgggaaagtttaggcgtttgtgatttttcgaaggattttgggttagtattttcgcgtttggattatttagggggttattagaaagtaatatacgttataagaaagatgtgggggagatttcgatgttcgcgtttttgttaggtggaggcggggtgtaggtagaagtcgcgcgttggattgttggatgaatttcgttacgcgtaggtttcgcgtcgatttcggaagggataggtaggttcggaagggatttttggggtttggggacgttttttagggtagagagtatcgttgcggttcgagcggttcgggtttttaggcgtggggtattcggtttttaagcgtttttcggggacgtaggcgtttacgtatcgtttagttgcgcgtttttagtatttagcgttcggcgttttcggcggagtttcgcgtattttttcggaaagtttgggggtttttttaatttaggttttttcgggagttttggggcgggggttggaagaaggggttatttatttcgtcgttcggttcgtttcgggttttcgaagtgtttgttttagtcgcggtttagtgcgttcgtaattaagtatttattttcgttttttttagtgtcgaagtttttttttcgcgttgtgtttttggtgaaaataggatatttttttcggttattttataataaatagcgtatataagcgggggagaagcggggcggagggagaagtcggtttcgagggggaggaggaaaggagaggagttaaaatttcggattgcgataggggggaaaggagaagaaaagaaaatgagagagcgcgtttagtcgtcgtagtcgttatttttcggtttttttcgtagttttttttttttttttaaggtagcgataattttacgtggataggatggaagttttgcgcggaagtcgggaacggtcggagcgtgcgtcgcgttgtcggtagtttcgtatttgcgtagggaggtggggcgggggcgacgtcgttatcggttattgcgggttcgtgaggtcgtcgggggtttcgggggaggtcgttagggacgcggggggcggcggcgcgcgggggatttatttcgtttttatttgatttcgggtgattgtttattgttatggtttgcgatttcgcgtggggatcgtttagggtttcggggttttggatgtttcgggtggcgtcgtcgtaattttcgtgtttttcgcgtcgtttttatttcgtttttattcgggtcgattcgagcggttgtagtttttaggttgaggggagggattcgcgatcgcgtttttttttttgggtcggagagttattgtcgatttttatttgtttttgtggggtagttttcggaattgtttggaattttttcgttatttagtttttttgtgtaggttattgcgggttttttgtcggatttttttttatttattttaagggaggagatagaagggatttcgtttatttgtaataacgtgaaataaaaattaatttagattagattggggcgttttttttgacgggaggaaatattttttttcgtggagatatatgttatgaaggattaagcggtttggggataggttgtgttgcgaagggtttgggttttttttagtgttgttgggtgtaggtataggtattcgttttagacgtttaaaggttaggtagtaacgatttatttttaaggcggcgttagagtttttttaggtatattgttgaaatgatatttcgtgtttaagttttttgcgtatgtattacgcgattatataggatttacgattttatatttatacgtgtgtatgttataattaggggatatagtaaaggtagacggaataaataatttataaattttgtatttatttaattattttttttaaaaatttattgtttattttagcggtattttttttgttatattgataataaatgttttaatttattgataaattattgagtgttaattattgtattggttatttatggtatatgagtttatttaatttttatgataattttacggtggttattattaagtcggtataaaagatgaggaaattaaagtttaaagaattatgagtgatttttttaaagataaatttagtggtttttaattataaagtttatgatataataatttttatattattttaggtgtggtttaagagattatagattaattcgtagaaattatttttatttaaagaaagtttagttttaatatatttattaagttacgttttgaaaaaggtttagaaaaaagattttattttttattttaggttggttttatgtaattgatatgagtattgtttaatttaaaagtagtattaattttgaatatttatggttataatttattttttaatgagtggggaattatttataatgtttaagaggttttagaaaaggtggtgttgtaaatttaaaatgataaaggtagtcgttgttgtttttattatttattgggtgtttttttttgtagatttattttggagggtgtaggtattgttaggtataatgtttttttttttggtttttaaggtagaaagggttttggtagtggggttggtataaagcggatttggagtatggttgagagtatattttggtttaacgaggaatgttagttaatatatattggagagaaaaatatgaatggatagatttaattaattttgtagatttattttttttattttatatgtgagaaaattaagggtttagaatttttagaagtttgttaataaatggtagatttgagttttaagttagtttttatttaagtttatttttagttattgtgatgttattattagtattaatggtatttagaaaaatagtaatttttttaaatatgtaatatattataagttaaatatgtaatttaaatgt

SEQ ID NO: 181 - DNA, 5649 bp, Artificial Sequence
  chemically treated genomic DNA (Homo sapiens)
cggtggtttatatttgtaattttagtattttgggaggttgaggtaggcggattataaggttaggagatcgagattattttggttaatatagtgaaatttcgtttttattaaaaatataaaaaattagtcgggtgtggtggcgggcgtttgtagttttagttattttggaggttgaggaaggagaatggcgtgaattcgggaggtggagtttgtagtgagttaagatcgtgttattgtattttagtttgggcgatagagttagattttattttaaaaaaaaaaaaagaaaaaagaaaatattttaagttttgaggattatatagtttttgttgtaattatttatttgggttattgtagtataaaaataaatatagataatatatatatgagtgagtatggttggggtttaataaaattttatttatataagtaggtgatgaattacggtttatagtgttttaatttttgatttagatggtgaattattatgagttttcgttgtttttttcggtagaaatatgggagaaattatagagagaaatagagattttaggaaaatagtaaaattaaataaataaagtgagacgtcgttttttttggaggttgtaggttgtgttgaatttgtgtgtgtttgggtgtatagggatgtgagtagatgcgcgtggagatgtgtgtgtgggtggagattgagcgtggttggaggtggttgtggtaggatgttagaaggaaggagtttgtatttagtttttttattagtattttttggagttgttgaggggatgttattgttgaatattgattttggtgtaggttaaatcgaagttagtttttgttattttttgttgggtgaggtattggggagaatagtgggattgaatggggcgggtttttttttttttatattttttttggaaatatttagtattagtatattagaatatggggagttattttttttagcgttgttttttaaggttcggaaggggaaattttgattttaagttttgtttgaagagcgatagtaaaggggagaggttggttgtggtttggtggtgtttattttttttttttgttttgaaattataggttggtatattattcgagagaatgattagtgttattaagggaagggtataagtttattggttttaggggagatattttaggggataggaatattttttgacgttgaatgagtgtagtatatagacggagaatatatataagagaaattatgaggatatgagagaaggtattggtaataggaagttataaaaagtaataaaaagaaagagtagatataaaaataataatcgaagaaagttaataatagatgggatgaattatacgaggtatgcgatttatggatgaagaggtgagtgatgagattagttggggaatttttttttaggaaagataaattagaagaaatataaatgatatcgaagtggttaggcgtagtggtttacgtttgtaattttagtattttgggagttcgaggtaggtggattatttgaggttaggagtttgagattagtttggttaatatgatgaaattttgtttttattaaaaatataaaaattagttaggtgtggtggtaggtatttgtgattttagttatttaggaggttgaggtaggagaattatttgaattaggaagtagagattgtagtgagttgagatggtgttagtgtattttagtttgggtagtagagtgatagtttgtttaaaaaaaaaaaaaggtagtaaagtgataggaggatagattagaagggttattttttagatagtgtaaggaagaaagaagaagaagaagaggaggaggaggaggaagaggaagaagacggagaagagggtattttagaagaaataatggagatatattttttaaaattgaagaaagatgattaattttagatcgaaggttaagaggtaaattagagagatagtttggtaagttaggaagagtattaaagttagataattagagtgaaattaaagaaaatttaaggtgataaaaatttaaaaagtttttttgtgattttagtttattggtgaaaatttaaaaaaaaaaaaaaaaaaaaaaggatagtttgggtaatatggtgaaattttatttttataaaaaatataaaaattagttgggtgtggtggtatatgtttgtagttttagttattcgagaggttaagtaaggtaggaggattatttggggttaagagttttagattagttgcggtaatatatatgttgtgggaagttaggtatttcgaacggagggattggttgaagttatggtagaagaatataaattgtgaagattttatggatatttattatttttttaattaatatttttgtgattttttatgtttgtttttaattttttaattttgttattttcgtaaattgaggatgtatgtcgttttaggattttgtgatgattgcgttaattgtataaattgtttgtagaggataattgttgtgtgtttgagtaatgtgaaatttgggtattttaagaataggataatagtaatttttagggaataagggagataattttaaagtttggttgtttgtgggttgggtaggatagagttatattttttttattatcgtaaataggtaagagaaatatcgttgaattttttttttagtaaggaatattaataattaatagttttgagaaaagaatgtatttttagggtcgggttattgaaatggtttttttgagagtgtttgtttttatttagaagtagaaagggatgaaatacgttttagttttttgtagtatttttagatttgataggattaggaaattttagtttggtaaattttagttagatcggttttttgtttttgaattttgatagtgcgtgttagtgggatttggaagtttattagtgattttagtttcgtcgtgattttttgttttgtgattttttgtcgtttttgaagtatgtgatttttgtgatttatattttgttcgtgtatttttttttttttgaaaattgttaataaaaattcgttggttttacggtttagggggtattacggaatttgcggatatgtgatgttttttttggatattcggttttaaaatgttttttttttgtattttttttttttattttttaggttagtcgatatttagggaaaataggaaaggatttacgtgaaatattgggggttgaatttttttcgataataagttttttaaaaaagatttttaaatgaaatttttttgttttttaatttttatttttgttttgggggtatatgtgaaggtttgttatataagtaaattcgtgttttcggtgtttgttgtatagaatattttattatttaggtattatgtcgagtatttaatagtttttttttttgtttttttttttttttttattttgtattttggagttaattatagtgtttgttgtttttttgtttgtgttataagtttttattatttagtttttatttataagtgagaatatttagtatttggatttttgtttttgtattagtttgttaaggataatagtttttagttttatttatgttttataaaagatatgatttagttttttttaatggttgtattaaatgaagttttaaagatataatataaatattaattttttttttattataaaaattttttgttgaatttgattatatttaaattaacgagttttgttttatgaaagattttttggataaatttgatagttgatggaataggagaagttgtttgttatgtttaaagttaataagagattaatatttagaataaatggagatttgtaaattaatagaaagtaggtagtaaagttaaagaaaatagtttaaggtatagttattaaaaggaacgtgattatgttttttgtagggatatgggtggagttggaagtcgttagttttagtaaatttatataggaatagaaaattagcgagatcgtatggttttatttataagtgggagttgaataatgagaatatatggttatatggcggcgattaatatatattggtgtttgttgagcggggtgttggggagggagagtattaggaagaatagttaagggatattgggtttaatatttgggtgatgggatgatttgtatagtaaattattatggcgtatatatttatgtaataaatttgtatattttttatatgtattttagaattttaaataaaagttggacggttaggcgtggtggtttacgtttgtaattttagtatttttgggaagtcgaggcgtgtagattatttaaggttaggagttcgagattagttcggttaatatggtgaaatttcgtttttattaaaaatataaaaattagttagatgtggtacgttatttataattttatttattcgggaggttgaagtagaattgtttgaattcgagagcggaggttgtagtgagtcgtcgagatcgcgttattgtattttagtttgggttatagcgtgagattacgttataaaataaaataaaataatataaaataaaataaaataaaataaaataaaataaaataaaataaaataaaataaaaaaataaaataaaataaaataaaataaaataaagtaatttttttttttttaagcggtttttattttttttttttgttttgtgaagcgggtgtgtaagtttcgggatcgtagcggttttagggaattttttttcgcgatgtttcggcgcgttagttcgttgcgtatatttcgttgcggttttttttttgttgtttgtttattttttaggtttcgttgggatttgggaaagagggaaaggttttttcggttagttgcgcggcgatttcggggattttagggcgtttttttgcggtcgacgttcggggtgtagcggtcgtcggggttggggtcggcgggagttcgcgggattttttagaagagcggtcggcgtcgtgatttagtattggggcggagcggggcgggattatttttataaggttcggaggtcgcgaggtttcgttggagtttcgtcgtcgtagttttcgttattagtgagtacgcgcggttcgcgttttcggggatggggtttagagtttttagtatggggttaattcgtagtattaggttcgggttttcggtaggtttttcgtttatttcgagattcgggacgggggtttaggggatttaggacgtttttagtgtcgttagcggtttttagggggttcggagcgtttcggggagggatgggatttcgggggcggggagggggggtagattgcgtttatcgcgttttggtattttttttcgggttttagtaaatttttttttgttcgttgtagtgtcgttttatatcgtggtttattttttagttcgaggtaggagtatgtgtttggtagggaagggaggtaggggttggggttgtagtttatagtttttcgtttattcggagagattcgaatttttttattttttcgtcgtgtggtttttatttcgggttttttttttgtttttcgtttttttcgttatgtttgtttttcgttttagtgttgtgtgaaattttcggaggaatttgtttttttgttttttttttgtatttttgattttttttcgggttgttgcgaggcggagtcggttcggtttttatatttcgtattttttttttttcgtagt

SEQ ID NO: 182 - DNA, 5649 bp, Artificial Sequence
  chemically treated genomic DNA (Homo sapiens)
gttgcggggagggagaagtacgagatgtggggatcgggtcgatttcgtttcgtagtaattcggggaggggttaggagtgtagggagggaatagggaaataggttttttcgaagattttatataatattggggcggggagtaggtatggcgggagaggcggggaataggaaggaggttcggggtaaaagttatacgacggagggataagggggttcggattttttcgggtgggcgaggggttgtgggttgtagttttagtttttgttttttttttttgttagatatatgtttttatttcgaattgggaaatagattacggtgtagggcggtattgtagcgaataaagaaaagtttgttggagttcgggggaggatgttaaggcgcggtgagcgtagtttgtttttttttttcgttttcggggttttattttttttcgaggcgtttcgggttttttgaaagtcgttaacggtattggggacgttttgggttttttaggttttcgtttcgggtttcgaggtgggcgaggagtttgtcgggagttcgggtttgatgttgcgggttggttttatgttgggagttttgagttttattttcggggacgcgggtcgcgcgtatttattggtggcgaagattgcggcggcgaaattttagcgaagtttcgcggttttcgagttttataagggtggtttcgtttcgtttcgttttagtgttgagttacggcgtcggtcgtttttttggagggtttcgcggattttcgtcggttttagtttcggcggtcgttgtatttcgggcgtcggtcgtagaggggcgttttggagttttcggagtcgtcgcgtagttggtcggggaagttttttttttttttttaggttttagcggggtttagggagtaaatagatagtaggaagaggatcgtagcgaagtgtgcgtagcgaattggcgcgtcgggatatcgcggggggaaattttttaagatcgttgcgatttcggagtttgtatattcgttttatagggtaggggagaggggtggaggtcgtttagaggaaaggaaattgttttattttattttattttattttattttatttttttattttattttattttattttattttattttattttattttattttattttgtgttattttattttattttatgacgtagttttacgttgtggtttaggttggagtgtagtggcgcgatttcggcggtttattgtaattttcgttttcgggtttaagtaattttgttttagtttttcgagtaggtggaattataggtggcgtgttatatttggttgatttttgtatttttagtagagacggggttttattatgttggtcgggttggtttcgaatttttgattttaggtgatttgtacgtttcggttttttaagagtgttgggattataggcgtgagttattacgtttggtcgtttaatttttatttgaagttttggggtatatgtagaggatgtgtaggtttgttatataggtgtgtgcgttatgatggtttgttgtatagattattttattatttaggtattaagtttagtattttttagttattttttttggtattttttttttttagtatttcgtttaataggtattagtgtgtgttgatcgtcgttatgtgattatgtgtttttattgtttagtttttatttataagtgagattatgcggtttcgttggttttttgtttttgtgtgagtttgttgaggttaacggtttttagttttatttatgtttttgtaaaggatatgattacgttttttttagtggttgtgttttaggttattttttttggttttgttgtttattttttgttgatttgtagatttttatttattttagatattgattttttgttggttttagatatgatagatagttttttttattttattaattgttaagtttgtttaaggagttttttatgaaataaaattcgttaatttaagtgtaattaaatttagtaagggatttttgtggtggggaagaggttggtgtttatgttgtatttttaaaattttatttaatgtagttattaaaaagaattagattatgttttttgtgggatatggatggagttagaggttattatttttagtaaattaatgtaggaatagaaatttaaatattggatgtttttatttgtaagtgggagttaaatgatgagaatttataatataaataaggaaataatagatattgtggttgattttagggtgtaggatgggaggaaggagaggagtagaaaagagaattattgggtattcggtataatatttgggtgatgaaatattttgtataataaatatcgaagatacgagtttatttatgtaataaatttttatatgtatttttaaaatagaaataaaagttaaaaaataaagaaattttatttaaaagttttttttaagagatttattatcgggggaaatttagtttttaatattttacgtgggtttttttttattttttttaagtgtcggttggtttgagaaataaagggaaagagtataaaagagagatattttaaagtcgggtgtttaggggagatattatatgttcgtaggtttcgtgatgttttttgagtcgtaaaattagcgagtttttattagtaatttttaaagaggagggagtgtacgaatagggtgtgggttatagagattatatattttaagggcgataaaagattatagggtagaaggttacggcgaaattagaattattaatgaatttttaggttttattggtacgtattgttagggtttaagagtagagaatcggtttgattagaatttgttaggttggaattttttaattttattaagtttgggggtgttgtaggagattagggcgtgttttatttttttttatttttgaataaaggtaggtatttttagggaggttattttagtggttcggttttgggaatgtattttttttttagggttgttaattattaatattttttattggggaaagaatttagcgatattttttttatttgtttgcggtaataagagaagtatggttttgttttgtttagtttataggtagttagattttaaggttattttttttgttttttgaaaattgttgttattttgtttttaagatgtttagattttatattgtttaaatatataataattgttttttataaataatttgtgtagttaacgtagttattatagggttttaaggcgatatatatttttagtttacgaagatgataggattaagagattaaagataggtataggaaattataagagtattgattggggaagtgataaatgtttatgaaatttttataatttatgtttttttgttatggttttagttagttttttcgttcggggtgtttgattttttataatatgtatgttgtcgtagttggtttggaatttttggttttaagtgatttttttgttttatttagtttttcgaatagttgggattataggtatgtgttattatatttagttaatttttgtattttttgtagagatggggttttattatgttgtttaggttgtttttttttttttttttttttttttaaatttttattaatggattgaggttataaggaagttttttaaatttttgttattttgggttttttttaattttattttaattgtttagttttggtgttttttttggtttgttaagttgtttttttggtttgttttttggttttcggtttgaggttggttatttttttttagttttgagaaatgtatttttattgttttttttgagatgttttttttttcgtttttttttttttttttttttttttttttttttttttttttttttttttttgtattatttggaaaatggtttttttaatttatttttttattattttattgtttttttttttttttagataggttgttattttattgtttaggttggagtgtattggtattattttagtttattgtaatttttgttttttggtttaagtgatttttttgttttagttttttgagtagttgggattataggtgtttgttattatatttggttaatttttgtatttttagtagagatagggttttattatgttggttaggttggttttaaatttttgattttaagtgatttatttgtttcgggtttttaaagtgttgggattataggcgtgagttattgcgtttggttatttcgatgttatttgtgttttttttggtttgttttttttgggagagagttttttagttgattttattatttatttttttatttatgagtcgtatatttcgtatgatttattttatttgttgttggtttttttcgattattgtttttatatttattttttttttttgttgttttttgtaattttttattgttagtgtttttttttatgtttttatgattttttttgtgtgtatttttcgtttgtgtgttgtatttatttagcgttaggggatgtttttgttttttgagatgttttttttggaattagtgagtttgtgttttttttttggtggtattggttattttttcgggtagtatgttagtttgtggttttaaagtaaaggaaggagataagtattattaaattatagttaattttttttttttgttatcgttttttaaatagagtttgaggttagagttttttttttcgaattttgggaagtagcgttggggaaggtggttttttatgttttaatgtgttggtgttgggtgtttttaggggaagtgtgggagggagaaagttcgttttatttagttttattgttttttttagtgttttatttagtagagggtagtagaggttaatttcggtttagtttgtattagggttagtgtttagtagtgatatttttttaataattttagagagtattaataaaggaattgaatgtaaattttttttttttggtattttattatagttatttttagttacgtttagtttttatttatatatatatttttacgcgtatttatttatatttttgtatatttagatatatataggtttaatatagtttgtagtttttaggaggggcgacgttttattttatttgtttaattttattgtttttttgaaatttttgtttttttttgtggttttttttatatttttatcggagagggtaacgaaagtttatgatagtttattatttaaattaaggattgggatattatggatcgtggtttattatttgtttgtgtaaataaagttttattgggttttagttatgtttatttatgtgtgtgttatttatgtttgtttttgtgttatagtggtttaaatgagtgattgtaatagagattatgtggtttttaaagtttaagatatttttttttttttttttttttttttgagatggagtttggttttgtcgtttaggttggagtgtagtggtacgattttggtttattgtaagttttatttttcgggtttacgttattttttttttttagtttttagagtagttgggattataggcgttcgttattatattcggttaattttttgtatttttagtagagacggggttttattgtgttagttaggatggtttcgattttttgattttgtgattcgtttgttttagttttttaaagtgttgggattataggtgtgagttatcg

SEQ ID NO: 183 - DNA, 12781 bp, Artificial Sequence
  chemically treated genomic DNA (Homo sapiens)
tattatgttgttagttggttttgaatttttggttttaagttatttttttgttttggttttttaaagtgttgggattgtaagtgtgagttattgtttttggttagttggtgatttatttgtataattgtttaatttattgaatacgtatggcgtgttaagtattgggttgagggttttataatgtttttttatttaatgtttagtataatttatgaagaaggtagtgttaatattatttttgttttatagatgtagaaattgaggtataggttaaataatttgtttaataagttcgtgtagtttagtaagtagtttagttgggatgtgaatataaattttgaatatagagtttttaattagtaggttagaggtttttaaatatttagtatatttattattttagtatttttttgttatattttttaggttaaaataattttattgattgttatgtaatttattaagtgtagttatttgaaaaaaaaatatatataaaagaaaaatatttttatttagtttttaaaataatttatatatagttatggaatgtatgtgttggttgggtattgtagattaaagatagtttagggtcgggtacggtggtttaggtttgtaattttagtattttgggaggttaagtagagagaagggtttgagtttaagagttggagatcggtttgggtaatatagtaagatttagtttttatagaaaataaaattattagggtgtgaggacgtatatttgtagttttagttgtttgggaggttgaggttggaggattagtttgggtaatagagtgagattttgttttagaaaaaaaaaaaaaaaaagatagatttttatttagatatgtatgtaggagtttatagaaaaaaaaagtgagtttaggaggttgttatttggtatttatataatttttttttttttgaatttcgaaatttattttatatatattatttaataggggaagaggagggagaaaaagttttttatgggaagaataaataggtttttgggggaataaaagggagataagaatgtttgtttttgtaggtgtaagtggtttttgtttttttttttggttattaaaatttttttagagaggagatttacggtagttttatttttagaaatttttgttgttagtcgtataagggaagttttgaaacggtatttttttgtatttgttggtttttaaatgtttttagttttaagtaatatttatgttaattttgggggtttgagtgtttttatataatatatgtgtttttttgttttttaatgaagtttgtgggaggtatttaattgtagtttttaaaatttggtttataggtattattgtttttattaaagacgaggaaataagtttagaaaagtattaattgtttcgagttatttgtttggttagttaggattagagtttagttttttatttaatttaaagtttaggtttttaattttttataattggcgtattttttttgaatttttattttttttttgtaaaagaataatatcggtcgggcgtagtggtttatatttataattttagtattttgggaggtagagatgggcggattacgaggttaggagtttgagattagtttggttaatatggtgaaattttatttttattaaaaatataaaatttagttgggtgtgttggtgtttgtaattttagttatttaggagattgaggtaggagaattgttttaatttgggaggcggaggttgtggtgagttaagatcgtgttattgtattttagtttcggtgatagagtaagattttatttttaaaaaaataaataataataataaaaagagaataacgttatatttagttgaattaaaatgaattaaatattaatatttgtattttaaaaacggtttagtttggttgggcgtagtggttttcgtttgtaattttaatattttgggaggtcgaggtaggaggattatttgaggttaggagtttgagattagtttggttaatatggtgaaattttgtttttattaaaaatataaaaattagttgggtagtagtagcgcgtgtcggtaattttagttatttaggaggttgaggaaggagaattgtttgagtttgggaggtgaaagttgtggtgagttgagattgtattattgtatattagtttgggagatagagtaagattttgttttaaaataaaataattaaaaaattaaaaaggtttagtttgggtaatatagtgaaatttcgtttttatagaaaatttttaaaatattagtagggtatcgggtatagtggtttatatttgtaattttagtattttgggaggttgaggtaggcgggttatttgtggttaggagtttgggattaggtaggttaatatggtgaaatcgtgtttttattaaaaaataaaaattagttgggtatggtggtaggtattagtaattttagtatttaggaggttgaggtatgagaattgtttgaattcgtaaagtaggggttgtagtgaattaagatggcgttattgtattttagtttgggtgatagaataagattttttaattaaaaaaaaaaaaaattagttgggtatggtgttgcgggtttgtggttttaggtatttaggaggttgaggtgagaggattatttaagtttgggaggttgaggttatagtaagttaagattacgttattatattttagtttttgtgatagagttagattttgttttaaaaaaattttaaaaagggtaaattttggtaattttatatagtttaatttagtataaggtggttgtaataattaaatgagataaaatggtgttaaattggaagtattatagtatttttgttaataatatagggttttagaattagtttttttgagtttaaatttaggttttattattttttagttatgtagttatgggtaagttatttgatttaattgtgttttagttttatttatgatatggagatataggataattagttttttacgtgtaattttgaaatttaaaaagttttgtaaattaaaagtttgggggtaaatttatttggtagtaaattttgatttgaggttatttatagtttatattttgtattttttttatttagtatgaataagtatgtaagttttattgtatgtttgattttagtatgtttttttagattttttgggggtgtttacgtatgtcggtgggggaaagagattaatttttaaatattattttaaatagttggttttattgtgtttgtttgggtagtatatatattaaaattggaatgatttttgtatagggatgaaatgtaaattcgtgaagtatattgtattttttttagtatatattatttttggtaatattttttttttttttttgagagggagttttgttttgtcgtttaggttggagtgtagaggcgcgatttcggtttattgtaagtttcgtttttcgggtttatattatttttttattttagtttttttagtagttgggattataggcgtgtgttattacgttaggttaattttttgtatttttagtagaggcggggttttattgtgttagttaggatggtttcgattttttgatttcgtgattcgtttattttcgtttttttttcgaagtgtcgagtgttgggattataggcgtgagttattgcgttcggttttcgttttttttttttagattgattttattatttgtttagtaaaggagaattttttggtagaatagtttttaagaataaggtaaataattaattttatataggtttttattaatgtatagttgttgattgtgattggttttcggtaatttggattttataatttggataaggggataaataattgtttgttttttattattttttttgaatttgaatagaatttttttatttttatagttttttagtttttttttttttttttttgagacggagtttcgtttttgtcgtttaggttggagtgtagtggcgcgattttggtttattgtaaacgttgttttttaggtttaagttatttttttgttttagttttttaagtagttgggattataggcgtatgttattacgttcggttaatttttggatttttagtagagacgggggttttattatgttgattaggttggtttttaacgtttgattttaggtgattcgttcgtttcggtattttaaagtgttgggattataggcgtgagttattgcgttcggttttttatagttttttagttttttaaaatttgaaaaattttgtaaagatatatttgggttaaagggtttagataacggattgtggtttttaagtatttacgttataggttattgagaggatcgatttagttattagatgtaaaatgttgggattagtgtttggtaaaggaaaattttgtatagttgtaggtttttattatatataatagtatcgttaacgaatgttattataatatttatttagcgtttattaagtgtttattttatataaattttgagaatataacgtgaaggtgaattgttgattaaagtttggtttttttcgtttcgtttttttgcgaaaatgttttaacggtaggaggttacgcgagcgttggacgcgttttttttcgcgagttttttttcgaggtttttcgggttttttcggttattttcgttcgggcggtgcgcgttttcgttgttttcgttttcgttttagagaggtagggtttttcgagtttgttagtttcgcggtcgtaattaatttcgggtcggagtgtttcggttcggttagtttcgcggcgtgagggaaggggagtttagtagtttttcgcgcggggtttaggcgtcggcggtagggcgggttttttatcgttagcgtgttagtttcgtttttatttattagtgtgttagtttcgtttttttttacgtcgtcgcgcgttcgggggcggggtttggcgcgtatcgttcgcgtacggcgaggcgtttgttgattggttattggggttcgggttttttcggcggagcgcgtttttttttagatttttcgttagtaggagtcgcgcggtagatgcggtgtttttaggagtttcgttcgatagaacggttgggttttgtcggttgtcggtatgtcgcgatagagtattttgtatagttttttttttaagttttcggcgttgagtgatgttaataaggtttcggttagggttttacgcgaaggcggtcgtgtcgtcgttgttttcggggtttttttttttttaggcggggatgcggtttggagcgaggttgggtttgggtttaggtttttggcgcgtttcgcgttatcgtttaaggcgaagaattttaacggagggttgcggagatcggtagcgtttgttgtttttattaggtagcggggtgggggtggggtcgaaggcgggggtatagcggcggggcgtttggaattcggcgaggggaggttcgtatagggggttgggggggtgtacggtttggttttgggttcggaggaggcggggtcgtagagttggtttgaatgagtgtaggggtcgagtttggagtatttgggggtgtagtttgtaaatagggtcggaggagagaggttgtgtaggaagagggttgtaggggagacgcggagagttcgggttttttggagggaggagacgcgtttcgttaggtgggggtgttgggttaaggaaggggcgacgcgcgtagtttcgggtggggagggggtttgggaggtgggagtattgggggtggggcgagaaggggaaggcgttcggtttatttggtgggcggggcggggggcggggtggcgggaaggaggaatgtttgcgggaggtcgaacggggagagttcggtggtgtggggtgcgaaaggaggtttttcggtcggcgcggagatagtgagttggggttttagtagtcgatcgaggtagatatttagaggtagttaagagtcgcggtcgtcgagacgttttggggacggtgggttttcggtttaggtgaggggtcgtcgagggggtgggttacgagttgcgagcgcgggggggtgtgttattatggggatcgcggggtttaattgggcggggcggggtcgtggggagtcgaagtgttgggattcggttgggtttttcggtaggtaggttgtacgtgtatcgagacgaagatagaatattttgacgtatgtggaaattcgtgtcgagtggaaaatattttattttatgaaatagtgtaatttttatggggtattattgggtttttagaggttttaatcgggcgttggataaagatgtgtggacgtgagtgatttcggggaagtttgtcgggagttgtttttattttatgggtagttaagtgttttttttttttttttttttttgagagagagtttcgtttaagtttaggttggagtgtaatggcgcgattttagtttatcgtaattttcgcgtttcggttttaagcgattttttagttttagtttttcgagtagtcgggattataggaatgcgtttttatatttcgttaattttgtatttttagtagagacggggtttttttatgttggttaggttagtttcggaattttcgattttaggtgatttattcgtttcggttttaaagtgttgggattataggcgttagttatcgcgttcggtttgtttagggttttttattcgggtagttggcgatattttgaaaagtttgtttttgttgtttgttagatatatatatatgtattttgagatagagttttgtttttttgtttaggttagagtgtagtggcgcgtttttggtttattataatttttgtttttggattaagagattattttgttttagttttttaagtagttgggattataggtgcgttttattacgtttggttaatttttgtatttttagtagagacgggttttattatgttggttaggttggtatcgaatttttgattttttgatcggttcgtattggtttattaaagtgttgggattataggtatgaattatcgagttcggtcgtttgttagatattaaatataaagtttaatggtcgttatttgaataaacgaagaaataaaggtttagaaaaaataatttatttaagataagagttagttcgtgttttttgtttggttttgttttgaaatggagtttcgttttgtcgtttaggttggagtgttgtggcgttttttcggtttattgtaatttttgttcgtcgggtttaagtgatttttttgttttagtttttcgagtagttgggattacgggtgtgtttatcgcggttcggttgattttttattatggagttttattatgttggttaggttggttttgaaattgttgattttaagtggtttatttattttagttttttaaagtgttgggattataggtgtgagttatcgtgttcggtcgttagttagtggttttgagtaatggattttaaatttatttaaatttagtttaaagtgttttaaaggaattttgagatttttttaagtgtaattatagtgttatttttgtttaagcgattttttttcgtagtttaaatatatatagttgtgtattagtagaatatgtttgtggggaatagagttagtattcgtaataataaatttttggttagaaaagtatgacgtattgtttatttgagtatgaattgattgttgaatttaaattaaacgggtgtatttattgtaaggatgtattttatatttatattgaatagcgtatgttatttgttttttgaggttgagtttaagagatttgtaaaaataaaacgtatatattttatttttcgttatggagaggattttagggtatttaagaaagatgggtatttgatattaggtttttaaagaaattgtagtgtttagattattttgtcgagtatagtattaggtattatggattttggatataattatgaataggataaagtaaagaggtaattgtagattttaagtggaaaggggacggagaggatgcgggttaggttaggtttttagttttgtaaatcgaaattagaaggataaataagtttagatagattatagtgagagtgggaagttggtttaggaagaggaaggtttgtaaattgtgggtaggatgaaaggaggaggagggagtattggagaagttaagtagagatttaattatgaatagtttgatgagttatagagatattcggatttattttatgaattatttaagttttaaaatatgttgagcgtattttttttttttttgagacggaattttatttttgttgtttaagttggagtgtagtggtgtggttttagtttattgtaattttcgttttttgggttttagcgatttttttgttttatttttttaagtatttggtattataggtgtttgttattacgtttagttaatttttgtgtttatagtagagacgggttttattatgttggttaggttagtcgtgaatttttgattttaggtgatttatttattttagttttttaaagtgttgggattataggcgtgaattatcgtatttggtcgtgagttatcgtgtttgttcgagtattttttaatgtttgttatttagatttttttttgtgttgaagtgtttgttttttgttgtttttttttttttttttagttttttgttatttgtgtgtgatataaatgtttttttttataatgagtttttttatttagtttatggttttgttgttgttgttgaataatagaggttttattttgttgtttaggttggtgttgaatttttgtttttaagcgatttttttattttagttttttaatttgttgggattataagtgtgagttattatatttagttttatggtatttttcgatgaataaattattgattataatgtggaatttgtttttttattttttttgtggttagtgtttttataggttttatttaagaaatttatagggaggttgggtgtagtggtttatgtttgtaaatttaatattttgggaggttaaggtaggttaatatggttagattttgtttttttaaaaaataagaaaattagttaggtatggtggcgtgtgtttgtagttttagttttttgggagattgagatgggaggatcgtttgagtttaggaggttgaggttgtagtaagttaagagattatgttatgtattttagtttgggtggtagagttagattttgtttgttaaaaaataaaataaaagttggtgaaaatgttgattatatattttaggaataattagtaattgatattaaaattatgggttaaagagaaagtaaaaataatgtgattttaaattagaatttaaaagatttgtttagcgtatgtttagataaagttattatttattatattaaagttttaatatttattttgtgagttgttagtttttttttttaatatttttttttatcgttttaaaaaattttaagaatatcggatatttaagatttatttaaagttttaaaagtatttgtaaaattttaaaattataatttaaggtgtttttggagggtaggagtaatggtggtaggtagtgttttgttttgttgtttaggttgaagtatagtggtagatttcggtttattgtattttcgatttattcggtttaagtgatttttttattttagttttttgagtagttgggattttaagtgtatattattttatgtttggttaatttttaaatttttttgtagaaataaggttttattgtgtagtttagatggtttcgaatttttgggtttttaagagatttttttaaagtgttgggattataggtgtgagttattatatttggtttattttggtatttttgaaaatcgtaggattattacggataaaattttaaaattatttttaaagaatttaggtttatatataaaaaaaatttggtttgttagtagtgagtgaagaaaaattttgagaaatgtttaaaatttttagttttgttatataatatattttattatttgtttaattattttttttgatttagaaattagttttttgggtttaggatgtttagtggtattttttttttttaagttttttagtattggaggaattgtatattagtaaaatttttagttttagtattttatagtttattgttatttttttttttttatttttttttttttttttttttttttttttttttttttgagatggagtttcgttttgttatttaggttggagtgtagtggtacgatttcggtttattgtaatttttgttttttaggtttaaatgatttttttgttttagtttttcgagtagttgggattatagatgttcgttattatgtttagttaatttttatttttttagtagagatggggttttattatgttggttaggttagtttcgaatttttgatttcgtgattaattcgttttggttttttaaagtgttgggattataggcgtgagttatcgtgtttagtttttttttttttttttttttttttttttttttttttgagacggagttttgttttgttatttaggttggagtgtagtggtatgatttgggtttattgtaatttttatttttcgggtttaagggagttttttgttttagtttttcgagtagttgggattataggcgtttgttattatgtttagttaatttttgtatttttttagtagagatggggtttcgttatgttggttaggttggttttgaatttttgattttaggtgatttgtttgtttcgtttttttaaaatgttgggattataggagtgagttattgcgttcggtttagtatattgttatttttttttttttttttttttttttttttttttttttgtttttttttttttttttttttttttgtgagacggagtttgtcgtttaggttggaatgtagtggcgtttttttggtttattgtaatttttgttgttcgggtttaagtgatttttttgttttaggtttttaagtagttgggattataggtttttgttattgtatttggttaatttttgtatttttggtagagacggggttttattattttggttaggttggttttgaatttttgatttcgtgatttatttgttttggttttttaaagtgttgggattatagatttgagttatcgtattcggtttatattgttattttttaatagtagagaaattatgtgttagattttgtaagtgtaatggtatataaaggataaaatgatgttgaaaaataaaattttttgtttaaatgtttatgtttttaatattttattttagaaaggaatttattttaaaattgataatggttggatttagttttttatataaattttttttttttagtgaggatgtatatttattttgtaaataaatggaagatattatttttttaattgtttgtttagaaatgaaataatttttttttaatgattttttaaagtatgagattttatatattatttaaaataatttatattgtattttatatatgataaagttttaaggtaatagtttttttttaagattaaagttatagttttttttttgtatttgagggggattggttgtaggatttttttgtgaatatttaaatttttggatgtttaagttttttatgagatgtagtatttgtatataatttatatatatttttttttgtattttatttttagattacgtataatatttaatagaatgtaaatgttttgaaattagttgtttagttgtattttaaattttgtatttttttttttttttttttgagatagagttttgttttgttgtttaggttggagtatagtatagtgattatagtttattgtatttttaattttttaggtttaagttgttttgtttcggtttttttaagtgttgggattataggtgtgagttattatatttggttattgttttttattggttttaaatttttgatttaaaatttttaatttaggttggttgaatttggattggaatttaaggatatgtttgttgagtatattgtatttattttggaatataattagaatgtttaatttgtatgttaaaaatattttatttggttaggcgcggtggtttacgtttgtaattttagtattttgagaggttaaggcgggtgaattatttgaggttaggagtttaagacgagtttggttaatatggtaaaattttgattttataaaaaaaaggtaaaaataagttaggtgtgatggcgtgtgtttgtagttttggttatttaggaggttgagatataagaatcgtttgaatcggggaggtacgttacgtttttagttgttgatttgagttttttcgtagtttgtagggggagggtaatagagtattaggtagtttttggaatatataggagtgtaattggaaaaagattttaagtaagtttaatgaattagataatttatttaattagtaaattatgtaattagtatgttttataataatattgtgagttagattttgtttttgatatgtatatattatattgtataggtgttattaatttggagagtatatatagtgagtttatgttttttttttgttattagtattatattaaaattttgttatggtttttaaattttgattttgagaaagttttttattttaataatataattatatttgtgtttgtttttatagttaaatatgtattatgatattagtttgtatatattttttaaatgatttgaatatttgattttaaaaattattttagaatttttgtgttttaatattaatgttagaagatttggaattgtttatttgtaggtaattgtttttaaggaaatttgattaaatattaattaagttatgtatttttttttggtaatagt

SEQ ID NO: 184 - DNA, 12781 bp, Artificial Sequence
  chemically treated genomic DNA (Homo sapiens)
attgttgttaaaaggaaatatataatttagttaatatttggttaagtttttttaaaggtagttatttataaataaataattttaagttttttggtattaatattgaagtatagaaattttagaataatttttaaagttagatatttaagttatttaaaaaatgtatgtaagttgatattataatgtatatttaattatgaagataaatataaatatagttatgttattagggtgagaaatttttttagaattaaagtttaaaaattatggtagaattttggtataatgttgatggtaggaaaaaggtatggatttattgtatatgttttttaaattagtagtatttatataatatggtatgtatatattagaaataggatttaatttataatattattataaagtatattgattatataatttattaattaggtaaattatttaatttattagatttgtttggaatttttttttagttatatttttatgtattttaaaagttatttaatattttattattttttttttataaattacggaaaaatttaagttaataattgagggcgtaacgtgttttttcggtttaagcgatttttgtgttttagttttttgaatagttaagattataggtatacgttattatatttggtttatttttattttttttttgtagagttagggttttgttatgttggttaggttcgttttaaatttttgattttaaatgatttattcgttttggttttttaaagtgttgggattataggcgtgagttatcgcgtttggttaaataaagtatttttaatatataagttaagtattttagttgtattttaaagtaaatatagtatgtttaataaatatatttttgggttttagtttagatttaattaatttagattaaaaattttaaattaaaaatttaaaattaataaaaaatagtgattaggtatgatggtttatatttgtaattttaatatttggggaggtcgaggtaggatagtttgagtttgggaggttaaaggtgtagtgagttgtgattattgtattgtattttagtttgggtaatagagtaagattttgttttaaaaaaaaaggaaaaaaaatataaaatttaaaatatagttgaataattaattttaaagtatttatattttattaggtattgtacgtaatttagagataaagtataggggaagatgtgtataggttatatgtaaatattatattttataagggatttggatatttaaggatttgggtatttataggggggttttgtaattaattttttttagatataaagggaggattgtaattttagttttagaaaagggttgttattttagaattttgttatgtgtaaaatatagtataaattgttttaaatgatgtatgaggttttatgttttaaaagattattagaaaagaattattttatttttaagtaagtaattaaaaaaataatgttttttatttgtttataggataaatgtgtatttttattaggaaaaaaaagtttgtgtgaaaagttggatttaattattattagttttgaaataaatttttttttgaaataaaatattagaaatataagtatttaaataaaaaattttgttttttaatattattttattttttatatattattatatttatagaatttgatatataatttttttgttgttaagaaatagtagtatgggtcgggtgcggtggtttaggtttgtaattttagtattttgggaggttaaggtaggtggattacgaggttaggagtttaagattagtttggttaagatggtgaaatttcgtttttattaaaaatataaaaattagttaagtgtagtggtagaggtttataattttagttatttgggagtttgaagtaggagaattatttgaattcgggtagtagaggttgtagtgagttaagaaaacgttattgtattttagtttggacgatagatttcgttttataaaaaaaaaaaaaaaaaaaaaaaaataaaaaaaaaaaaaaggaagaagaaagaaagaaagaaatagtagtatgttgggtcgggcgtagtggtttatttttataattttagtattttgggaggacgaggtaggtagattatttgaggttaggagtttaagattagtttggttaatatggcgaaattttatttttattaaaaaaatataaaaattagttgggtatggtggtaggcgtttgtaattttagttattcgggaggttgaagtaggagatttttttgaattcgggaggtggaggttgtagtgagtttagattatgttattatattttagtttgggtaatagagtaagatttcgttttaaaaaaaaaaaaaaaaagaaaaagaaaaagaaaaaggttgggtacggtggtttacgtttgtaattttagtattttgaaaggttaaggcgggttgattacgaggttaggagttcgagattggtttggttaatatggtgaaattttatttttattaaaaaaataaaaattagttgggtatggtggcgggtatttgtaattttagttattcgggaggttgaagtaggagaattatttgaatttggaaggtagaggttgtagtaagtcgagatcgtgttattgtattttagtttgggtgatagggcgagattttattttaaaaaaaaaaaaaaaaaaaaaaaaaagaaagaaagaatgaaagaaaagaaatagtagtaagttataaaatgttaagattaaaaattttattaatatgtagtttttttaatgttaaaaagtttgaagaaaaagagtattattaaatattttggatttaggaaattggtttttgagttaaaaaagataattaaataggtagtaaaatgtattgtgtaataaaattaaaaattttaaatattttttaaaatttttttttatttattgttaataaattaaattttttttgtgtgtaaatttgaattttttaaaggtaattttaaaattttattcgtggtaattttgcggtttttaagaatgttaaaataggttaggtgtggtggtttatatttatgattttagtattttgggaggattttttaagagtttaggaattcgagattatttgggttatatagtgagattttgtttttataaaaaaatttaaaaattagttaggtatggggtggtgtgtatttggggttttagttatttagaaagttgaggtgggaggattatttgagtcgaataggtcgagggtgtagtgaatcgagatttgttattgtattttagtttgggtaataaagtaaaatattgtttgttattattgtttttgttttttaaaaatattttaaattatgattttaggattttgtaagtgtttttaaagttttaagtgagttttaaatgttcggtatttttggggttttttaagacggtggggaaaaatgttaagaggaaaagttgatagtttataaaataaatgttaaaattttgatataataagtaatggttttgtttaaatatacgttaaatagattttttgaattttggtttaaaattatattatttttgttttttttttagtttataattttgatgttaattattagttgtttttaaaatatataattaatatttttattaatttttattttattttttggtagatagggtttgattttgttatttaggttggagtgtatggtatgattttttggtttattgtagttttaattttttggatttaagcgatttttttattttagttttttaagaagttgggattataggtatacgttattatgtttggttaatttttttattttttggagagatagggtttagttatgttggtttgttttggttttttaaagtgttgggtttataggtatgagttattgtatttagtttttttgtggattttttaaataaaatttatagaaatattaattatagagaaaataaaaggataaattttatattataattaataatttgtttatcgaaagatgttataaggttgggtgtggtggtttatatttgtaattttaataggttgggaggttgaagtgggaggatcgtttgagagtaagagtttaatattagtttgggtaataaagtgagatttttattatttaataataataataaagttataaattaaatgaaagaatttattgtgaaagaagatatttatattatatataaatgataaagaattaggaaaaaaaaaagaaatagtaaaagataaatattttagtataagaagaaatttaaatgataaatattaaaagatgttcggatagatacggtggtttacggttaggtgcggtggtttacgtttgtaattttaatattttgggaggttgaggtgggtggattatttgaggttaggagtttacgattggtttgattaatatggtgaaattcgtttttattataaatataaaaattagttgggcgtggtggtaggtatttgtaatattaggtatttgagaggatgaggtaggagaatcgttggaatttaggaggcggaggttgtagtgagttgagattatattattgtattttagtttgggtaataagagtgaaatttcgttttaaaaaaaaaaaaaatacgtttaatatgttttaaggtttaaatgatttatggagtaagttcgaatgtttttgtagtttattagattgtttatgattggatttttgtttaatttttttaatgttttttttttttttttttattttatttataatttgtagatttttttttttttgaattagttttttatttttattataatttgtttaagtttatttgtttttttggtttcggtttatagagttgagagtttagtttgattcgtatttttttcgttttttttttatttggagtttataattgtttttttgttttgttttgtttatggttgtatttaggatttataatgtttaatgttgtgttcggtagagtgatttagatattgtagtttttttagaaatttagtattaaatgtttattttttttgaatattttggaattttttttataacgggaggtgaaatgtatacgttttatttttataagttttttaaatttaattttaagaaataaataatatacgttatttaatatgaatgtaaagtatatttttataataaatatattcgtttggtttggatttaataattaatttatgtttaagtaaataatacgttatgtttttttaattaggagtttgttattgcggatgttggttttgttttttataagtatattttattaatgtataattatatatatttaaattgcgggaaagggtcgtttaaataagggtaatattataattatatttagaaaaattttagaatttttttaggatattttaaattggatttaaatggatttgaaatttattatttaaaattattaattagcggtcgggtacggtggtttatatttgtaattttagtattttgggaggttgaagtgggtggattatttgaggttagtagttttaagattagtttggttaatatggtgaaattttatggtgaaaaattagtcggatcgcggtgggtatattcgtaattttagttattcgggaagttgaggtaggagaattatttgaattcggcgggtagaggttgtagtgagtcgagaaagcgttatagtattttagtttgggcgatagagcgagattttattttaaaataaaattaaataaaaaatacgaattggtttttattttgaatgagttattttttttgagtttttattttttcgtttgtttaaatagcgattattaaattttgtgtttagtatttgataaacggtcgggttcggtggtttatgtttgtaattttagtattttggtaggttaatgcgggtcgattaagaggttaggagttcgatattagtttggttaatatagtgaaattcgtttttattaaaaatataaaaattagttaggcgtggtggggcgtatttgtagttttagttatttgggaggttgaggtaggataattttttgatttagagatagaggttgtggtgagttaagaacgcgttattgtattttagtttggataaaagagtaagattttgttttaaaatatatatatatgtatttggtaaatagtaaaagtaagttttttaaaatgtcgttagttgttcggataaaaagttttaaatagatcgggcgcggtggttagcgtttgtaattttagtattttgaggtcgaggcgggtggattatttgaggtcgggaatttcgagattagtttgattaatatggagaaatttcgtttttattaaaaatataaaattggcggggtgtgggggcgtatttttgtaatttcgattattcgggaggttgaagttggggaatcgtttgaagtcgggacgcggagattgcggtgagttgagatcgcgttattgtattttagtttggatttgagcgaaatttttttttaaaaaggaaaaaaaaaaaaaagtatttaattgtttataaagtgaggataattttcgataggttttttcggagttatttacgtttatatatttttgtttagcgttcgattaaggtttttaaaagtttagtggtgttttataaaaattatattattttataaaataaaatattttttattcgatacgaatttttatatacgttaaaatattttattttcgtttcggtgtacgtgtagtttatttatcgaaggatttagtcggattttagtatttcggttttttacggtttcgtttcgtttaattaggtttcgcggtttttatggtgatatattttttcgcgttcgtagttcgtggtttattttttcggcggttttttatttaggtcgaaggtttatcgtttttaaggcgtttcggcgatcgcggtttttaattatttttaagtgtttatttcgatcgattattggagttttaatttattattttcgcgtcggtcgaggaattttttttcgtattttatattatcggatttttttcgttcggtttttcgtaggtatttttttttttcgttatttcgtttttcgtttcgtttattaagtgggtcgggcgttttttttttttcgttttatttttagtgtttttattttttaggttttttttttattcggagttgcgcgcgtcgttttttttttagtttagtatttttatttggcgggacgcgttttttttttttaaaaggttcgaatttttcgcgttttttttgtagttttttttttgtatagtttttttttttcgattttgtttataagttatatttttaaatgttttagattcgatttttgtatttatttaagttaattttgcggtttcgtttttttcgagtttagggttaggtcgtgtatttttttaattttttgtgcgagttttttttcgtcgggttttaagcgtttcgtcgttatgttttcgttttcgattttatttttatttcgttatttggtgggggtagtaggcgttatcgattttcgtagtttttcgttgaggtttttcgttttgggcggtgacgcggagcgcgttaagggtttgggtttaggtttagtttcgttttaggtcgtattttcgtttggggaaggagaggtttcgggggtagcggcggtacggtcgttttcgcgtgaggttttggtcgaggttttgttggtattatttagcgtcggagatttggggaagaagttgtatagggtgttttgtcgcgatatatcgatagtcggtaaggtttaatcgttttgtcggacggagtttttaaaagtatcgtatttatcgcgcggtttttgttggcgggaaatttggggggaggcgcgtttcgtcggaggaattcgggttttagtggttaattaataggcgtttcgtcgtgcgcgggcggtgcgcgttaggtttcgttttcgggcgcgcggcgacgtggggaagggcggggttggtatattggtgggtaggggcggggttggtacgttggcggtgaggggttcgttttgtcgtcgacgtttgggtttcgcgcggggaattgttgagtttttttttttttacgtcgcggggttggtcgggtcggaatatttcgattcggggttagttgcggtcgcggggttagtaggttcggaaagttttgtttttttggagcggaagcgggaatagcgggggcgcgtatcgttcgggcggggataatcggggggattcgaaaggtttcggaaaggggttcgcggggagaaacgcgtttagcgttcgcgtgattttttgtcgttagagtattttcgtaaggagacggagcgaaagggattaaattttagttagtagtttatttttacgttgtatttttaagatttgtatagagtaggtatttggtaaacgttaaatgaatattgtaatagtattcgttagcgatgttgttgtgtatggtgaaagtttgtagttgtataaagtttttttttgttaggtattgattttagtattttatatttggtaattaaatcgatttttttaataatttgtgacgtaagtatttaagggttatagttcgttatttgagttttttgatttaggtgtgtttttataggattttttaaattttagaaagttaagagattatgagaggtcgggcgtagtggtttacgtttgtaattttagtattttgggatgtcgaggcgggcggattatttgaggttaggcgttgaagattagtttagttaatatggtgaaattttcgtttttattaaaaatttaaaaattagtcgggcgtggtggtatgcgtttgtaattttagttatttgggaggttgaggtaggagaataatttgaatttgggaggtagcgtttgtagtgagttaaggtcgcgttattgtattttagtttgggcgataagagcgaaatttcgttttaaaaaaaaaagaaagaaagttaagaggttatgagaataaaaaggttttatttaaatttaagaaagatagtggaagatagataattgtttgtttttttatttagattgtgaaatttagattgtcggaaattagttataattaatagttgtatattggtaaaaatttatgtaaaattagttgtttgttttgtttttggagattgttttgttagaaggtttttttttgttaggtaagtaataaaattaatttaaaaaaaaaaggcgggggtcgggcgtagtggtttacgtttgtagttttagtattcggtatttcggggggggggcggaggtgggcggattacgaggttaggagatcgagattattttggttaatatagtgaaatttcgtttttattaaaaatataaaaaattagtttggcgtggtagtatacgtttgtagttttagttattggggaggttgaggtaggagaatggtgtgaattcgggaggcggagtttgtagtgagtcgagatcgcgtttttgtattttagtttgggcgatagagtaagatttttttttaaaaaaaaaaaaagaatattgttaaaggtggtatgtgttaagaaaaatatagtatgttttacgaatttgtattttatttttgtgtaggggttattttaattttggtatatgtgttatttaagtaagtatagtgaaattaattgtttgagataatatttgagagttggttttttttttttatcggtatacgtaaatatttttagagagtttgggggaatatgttgaaattaaatatgtagtaaaatttatatgtttatttatattaagtagaaagaatatagaatatagattataaatagttttaggttaaaatttgttattaaatgagtttatttttaaatttttggtttatagagttttttggattttagaattgtacgtaagaggttggttattttgtatttttatattatggatgaagttgaggtatagttgggttaagtaatttgtttatgattgtatagttaggaagtggtggagtttggatttaaatttaaggaagttggttttggagttttatgttgttaatagaaatattataatatttttaatttaatattattttattttatttagttattataattattttatattaggttgaattatgtgaaattgttaaaatttgttttttttaaaatttttttgagatagggtttggttttgttatagaggttggagtatagtggcgtgattttggtttattgtagttttaattttttaggtttaagtaatttttttattttagttttttgagtatttgggattataggttcgtaatattatgtttagttaattttttttttttttaattgaggagttttattttgttatttaggttggagtatagtgacgttattttggtttattgtaatttttgttttgcgggtttaggtaatttttatgttttagttttttgagtgttaggattattggtgtttattattatgtttagttaatttttgttttttagtagagatacggttttattatgttggtttgtttgattttaaatttttgattataagtgattcgtttgttttagttttttaaagtgttgggattataggtatgagttattgtgttcggtgttttgttagtattttaaaaattttttgtagagacgaagttttattatgttgtttaagttggatttttttggttttttggttgttttgttttgagatagggttttattttgttttttagattggtgtgtagtagtgtagttttagtttattataatttttattttttaagtttaagtaattttttttttttagttttttgaatagttgggattatcggtacgcgttattattgtttagttaatttttgtatttttagtagagataggattttattatgttggttaggttggttttaaatttttgattttaaatgatttttttgtttcggttttttaaaatgttgggattataggcgggagttattgcgtttagttaagttggatcgtttttgaagtataaatattaatatttaatttattttggtttaattgaatataacgttattttttttttgttgttgttgtttgtttttttggggatggagttttgttttgttatcgaggttggagtgtaatggtacgattttggtttattataattttcgttttttaggttaaggtaatttttttgttttagttttttgagtagttggggttataggtattaatatatttagttaagttttgtatttttagtagagatggggttttattatgttggttaggttggttttaaatttttgatttcgtgattcgtttatttttgttttttaaagtgttgggattatagatgtgagttattgcgttcggtcgatgttatttttttatagggaggaaatggaggtttagaggggatgcgttagttgtaagaggttaagagtttgggttttgggttaaatggagaattgagttttgattttagttagttaagtagataattcggagtaattaatatttttttgaatttgttttttcgtttttgataaggatagtagtatttatgggttaaattttggaggttatagttagatgttttttataaattttattaaaagataagagaatatatgtattatgtggggatatttagatttttagaattggtatgaatgttatttggaattgaagatatttgagagttaatagatgtagaaagatgtcgttttaaagttttttttatgcgattaatagtagaaatttttgggagtgaagttgtcgtaaattttttttttaggggagttttagtggttagaaaaaaagataaagattatttgtatttgtaaaaataaatatttttattttttttttgtttttttagaaatttatttgttttttttatggaaggtttttttttttttttttttttttattaaatggtatatataaagtagatttcgagatttaagaaaaaaaaagttgtataaatgttaaataatagttttttggatttattttttttttttgtgaatttttgtatgtatatttgaataaaagtttgtttttttttttttttttttttgagatagggttttattttgttgtttaggttgattttttagttttagttttttaagtagttaagattgtaggtgtgcgtttttatattttgataattttattttttgtagagattgggttttgttatgttgtttaggtcggtttttaatttttgggtttaagtttttttttttatttggttttttaaagtgttaggattataggtttgagttatcgtgttcggttttaaattgtttttagtttgtagtgtttaattaatatatatattttatgattatatatgggttattttgaaaattgaataaaaatattttttttttatatgtattttttttttaaatggttatatttagtaaattgtataataattaatggagttgttttggtttaggagatgtggtaggaaagtattaaggtagtaaatatattaggtgtttgggaatttttggtttattggttaagagttttgtatttaaagtttgtgtttatattttagttgagttgtttattaaattgtacgagtttgttgggtaagttatttagtttgtgttttagtttttatatttgtaaaatagggatgatattaatattattttttttatgggttgtgttaagtattgagtgaaagggtattatgaagtttttagtttagtgtttggtacgttatacgtatttaataaattggatagttatataaataaattattaattggttagggatagtggtttatatttataattttaatattttgggaggttaagatagaaggatgatttgaggttaggagtttaagattagttagtaatatagtg

SEQ ID NO: 185 - DNA, 1631 bp, Artificial Sequence
  chemically treated genomic DNA (Homo sapiens)
ggatttagaatatggggcggatttaggtagcggcgggaattaggcggattcgtttggatcgaagttttcgttaggtatcgaagtcgtgaagtcgtttgcgtagtaaagggagttttcggggggcgttcgagattttggtgtcgttcgggggtcgttggtagtcgcgttcgttgtttttcgttcggtgatttagtcggtatttttggcggggttatgggggttagaggatagcgcggggggcggcgagcgcggttgttaagttttttaaggtttcggagggataggatttgggcgtattttatcggttgttatggtaacgtagcgttttagtttttcgcgtttcgcggtggagggaggcgtagttaatcggaagcggcggagttttcggggattttttttttttcgttttacgtcgtgtgtgggcgggggttaggaggtgcggggcggaggcggagcgtgggtcgcggagattcggcgttcgtaggaggtttggtgcgcggcggggttgtacggggttattttcggagtagtattgcgagtagcggcgcgatagtgcggggtttttttttttttagaagagacgttatttatataaatttgatttttacgtggggcgcgggattttgcggggttttagtcgtaggcgtttttgttgtttttttcgggcgggtgggttggagaagaagtttacgcgggattttttaaaacggcgtatagggggattttagggttttatggttatttttttggatttttcggaggcgttgtttagttatttttagtcgttttgatgattcgtcgtgggtttttttaggagattcgaaagtttagggcgggttgtgtgggtaatatttttgtttaggttttcggagggttttacgtggttgtttttggagtattttagagcgttagggttgcgggaaggggcgggtgtgtttttggaaatatgagcgtttgttagtattagtgtttggatagggttggggataaattagtttatgtcgcgtatatcgaatttatgcgtttgagtgagggtgggtgtgttggggagtgcgtttaagtggatagtgtcgtatagtaatgtttacggggagttttaggagagttcggttatttttgcgtaggataattttttttttattattcgagtttcgtgttcgcgggtaggattttttcgaattggggttgtgtgtttagaaatacgtatatgggagcgtttagtttaaagttttagggtttttgggattcgcgtgttcggggtcggggttttaggtgggtataggtgggagggcgaatttgcgggtagggtgggttttttttcgcgggtttagtatttgtgcgtttttagtttaggtgcgcgggaggaaggtagcggtttgtcgcgtagagttttgcgcgttcgcgaggtggcgttatagtcgtagtagcgttcgtcggttcgggtcgttttagataagagtgtgcggaaagcgcggcggggttgagacgcgattaggacgcggggaggacggattagtaggatagatcgatcgggggttcggcgggcggagggtagcgtagttacgttttttttggattcgtcgttagtcgggttcggggttttcgatatgttttttaggtgggttttcgag

SEQ ID NO: 186 - DNA, 1631 bp, Artificial Sequence
  chemically treated genomic DNA (Homo sapiens)
ttcgaggatttatttggggggtatgtcgaaagtttcgggttcggttgacggcggatttaggggggacgtggttgcgttgtttttcgttcgtcgggttttcggtcggtttgttttgttggttcgtttttttcgcgttttggtcgcgttttagtttcgtcgcgtttttcgtatatttttatttggagcggttcgggtcggcgggcgttgttgcggttatggcgttatttcgcgggcgcgtagggttttgcgcggtaggtcgttgtttttttttcgcgtatttgagttggaggcgtatagatgttgagttcgcggggaggggtttattttattcgtaggttcgtttttttatttgtatttatttgggatttcgatttcggatacgcgagttttagaaattttggggttttgagttgagcgtttttatgtacgtatttttaggtatatagttttagttcggaaaagttttgttcgcgagtacgggattcgggtggtgggggagaggttattttgcgtaggagtagtcgagtttttttggaatttttcgtagatattattgtacggtattgtttatttggacgtattttttaatatatttatttttatttaggcgtatggattcggtgtgcgcggtataaattgatttgtttttagttttatttaggtattgatattaataggcgtttatgtttttagaagtatattcgttttttttcgtagttttagcgttttgggatattttaggggtagttacgtagggtttttcgggaatttgggtagaggtgttatttatatagttcgttttgaattttcgggttttttaaaggaatttacgacgagttattagggcgattggaagtggttggatagcgttttcggggggtttaaagaagtaattatggggttttagaatttttttgtacgtcgttttgaagaatttcgcgtggattttttttttaatttattcgttcgaaggaaataataggggcgtttgcggttgggatttcgtaaggtttcgcgttttacgtgaaggttaggtttgtgtgggtgacgttttttttgggagaaaggggatttcgtattgtcgcgtcgttgttcgtagtattatttcggaagtggtttcgtgtagtttcgtcgcgtattaagttttttgcgaacgtcggattttcgcggtttacgtttcgttttcgtttcgtattttttgattttcgtttatatacggcgtggagcgggggggggggggttttcgagaatttcgtcgttttcgattggttgcgtttttttttatcgcggagcgcgaggggttggggcgttgcgttattatggtaatcggtgaggtgcgtttagattttgttttttcgaggttttggagagtttagtaatcgcgttcgtcgtttttcgcgttgttttttggtttttatggtttcgttagaggtatcggttgagttatcgggcgaggggtagcgggcgcggttattagcggttttcgagcgatattaaggtttcgggcgtttttcggaggttttttttgttgcgtaggcgattttacggtttcggtgtttggcggaggtttcggtttaaacgagttcgtttgattttcgtcgttgtttgagttcgttttatgttttggattt

SEQ ID NO: 187 - DNA, 9254 bp, Artificial Sequence
  chemically treated genomic DNA (Homo sapiens)
tgggggaaattgattttatgatttaattatttttatttgattttatttttgatatgtgaggattattataatttaaggtgagatttgagtggggatataattaaattatatgagtggatatgtaatatgagtgagaaataattttgtgattgtaatttagtaagatttttggatggttaatatagtataatttagagtatatggaggtgtgtatttttagttttttgattttcgggtatttagtaggattgtatttttttgtattttttaagtaaggtatggttatgtgattaattttagttaataatatgtaaatataataaaaagtgttatttttaggagggagtttttaaagttaatgtgagtttattatgtttttttttttttgttaaattgatgcgatgattgttgaagtatgtattaagatgaaattttttttagattaggtttttaaatgagtatattaagtagagtttcgtgaagttgaatatgtagtatgagtaaaatataaaatttatttttaagttattgaaattttaggattgtttgttatggtagtataatttaaattattttgatttatataaaaattggtttttagatatgggttagtgtaataataataataagtataataataataaaattaaataattatttagagggcgataattaagaatattgttattagaagttgaagggatggtgatttgtttggtaaatatattatttgtgataatgtagaaggtagattatgaatttgatgaattaaagaaaaggattgtaaaatagagagtgagtagtgtgtgttggtggttgttggatgtattttgaaagttattataagttatttaaagatgaatttagaaaaatttggtttgtttgtaattaggaatgaaatggaatagagaaaatttataaatttagggatttatatcgttagaagaggtaattgttttttagtttcgattggtaaaatataaaattaagaaatatttttagtaagaaaggatttggaagaaattaagttttgaagtaaggattaagttataaagtatgaatttattattaaaattttaggataggaggtcgaggaggacggattatttgaggtcgggagttcgagataagtttgattaatatggagaaattttgtcgtttttaaaaatataaaattagtcgggcgtggtggcgtatgtttgtaattttagttatttaggaggttgaggtaggagaatcgtttgaattcgggaggtagaggttgtagtgagtcgagattgtgttattgtattttaattagggtaataagagtgaaatttcgttttagaaaaaaaaaaaaaaggattaattaagattttatttagtatatatttttaattggataaaatggttttgggaaaaggaagaaaggtttaatttttttattaaaatttaataagtttaaagtgtttaaaattaagtgaagagtaagagagtgagacggtaaaagagagatagaggagttaataggtaggagagtaggaaagtaaagagatatggtaaattaaagaagtatgtttggaaaagaattttgtggttattgttatatggaatattttatattagatagataagaagtttatttatatatatttaagatttaatgttattttgtatttttttaatttttaaaagtttatttaaaagtatattttttaatgtttgttttagttgtggaaaaggaagatttttcgagggtaaatttaggagttatggaaaataatgggtagggtagtttggtgttgtgattggatgggtttttaaggttgttttttttgaataaagaatgagggaattttattaggggaaggagagtagattaaatatttggtgaatagaaagggagatagagtttttagtgttattttttaaatatttttggagagttttttgagatatttggtaggattatagtgatttaaagaggtatggttatgtgattgttttggttaatgatgtatgggtagaagtgatgtgtgttataagtggatgttttgatagttatgatgtttcgagttttttttttatagttaggatagttgtgaaaaggggtattaatacgaggttttttttagtttgagttttttagtgattataatgagtagagttattttgttaatttataacggttatgtagtagaaatgattaatttttattggaataagttattgatatgttagggttgtttgttagggtagtataatattgttttttttgatagaattgggagtgagagataaggttggagagagaaggagttggattgtgaaaagttttttttttaaggtataggaatcggaatttttttgattgtaaggaaaagttaatgaaggtttttaagtaggggcgttaatatgaatagatttgttatttttttggatgaaatatgttattttttaatataaggagaagattagtttattaaattatatgaggtagagaggaatatatagaattttaggtaaaagatatatatttatgtaaagttttaagttttgaaatttttaaatataagagttttgaacggagttatagttagaggattaggtaagaaaattttttttatgttataagcgttattttttttgtagataattaatattttataagaaagtttgttagagtagagaaaatataaaggaatgtaatatagatttgaggttaatttttagttgtttgtgtgattttaataaagatatttaatttttttgggtttatttttttatatgttaaatttggataataatatatgttttttaagatagttgtggggagaaaatagcgtatttaaattgtttaggagaatgtttggtagataataagtgtttaatatatgaaattgatttttattattgttattaaaaaatatttagaatattaattttttgaatataatagaaaatgatttagggtaatagatagaggagaatgttttttttttgaggaagtaattggattttgttattattgtatatttatttattttattttttttttagtttagtgtttggtttatagtaggtttttagttattttttgtagattagtgaaagttaggtgagtgttcggagtgaagaaaagttggtaggttttttattgatattagttgttgttggtttttgaatatttaaagtcgtaaatattttagggttgggggtaatgaatttaaggttgaattttaagtttagaagtagcgaagtttgaatttagaatttaggaatttaaattgttgtaggtttaattttaagttttagttttagatagaggtttgggaaagatttgatttttaattcggtttttttttttttttttttttcgatgttttttataggaaagtatatttggttttgttaaatcgtatttttatattttggtattttatttaggttttgcgaggatggaaattgcgaggtaggggagggaagcgggttgtttggttattatttttttagtgttgtaggcgattttgttatattaatttttggtagtttagtgaggtggacggtatcggttttatttgtagatgagggaaatgaagttcggaggagtttcgtgatttgtttgttttatattgtggtagtttggttacgaaagaattaggattttcgatttcgggattttttttattatatattttcgtttttaaggggtggggggcggggggagaataaaataatcgcggaaaaggaattatttatatgtgtttagcgttttttagaggttatttaggatatgcgtttattattcggtcgggagtgtagagatttgaagtttaggttttatttcgggtttcgagtattattgcgtgattttatgcgagtgttcgtcgttttttgggtttgttttttcggaagtaattcggcgcggatggagtgtgtgtgtgcgcgcgcgcgcgcgttatgttgtgcgtgttgtgttaagcgtgtgcgtgttgttcgggggcgggagggggagtagattaatatcggggtttttcgagtttcggatcgtttatacgtttgtttttatttggattttgttatttattaattgcgtttattataaaaattgttttttcgaggtaaagttgtgaattttcgcgtttttttttttacggtttcggaggatgaagtggggtgtaacggagatttagttgagcgtttagtttcgggtaatataaatttttcggtttttacgagtagttagacgatttcgcggatcgtcgtttttgaatttgatcgagatgtaaatttcggagtgtttttaacgtggggggtcgattttcgggagatcgtttttaaatttaagtttttttaggttcgtttttatttgggattttatagagttattttaagggcggtattttcgttttttcggaagtgcgggggggtggtagcgtatttggatttttagtttttagtttcgcgcggtggcggtcgtcggtggatgatttcgggttttataagtggggaaataataattatttttcgttcgtatttttggtttaaaataattggttaggttttttggtttttcgggtttttgtatttttcgtattttcgttcgtagtcgtgaatttgagtttttttttattagaggttgcgagcgttcgttcgttcgcggtagttatcgttattagatagttaaattttaagacgttagtttataatgtatcgggcgggtcgggaaaaacggttcggggaggggatcggggaagagagggtcgagaggcgtgcggtaggggggagggtaggagaaagaagggttcgattgtaggagggtagcggagtattattttatttcgtgagttttcgcgggtttagagaagaattttttagggtggagtttttatggtgacgggcgggttcgtttttttgagagcgacgcgagttaatgggaaggttttggggtgatattatgggttatttttaggggttgattggtagtagataagtgttgagttcgggttggataagggtttagagttgtattgagtgtggttgaagtagcgaggcgggagtggaggtgcgcggagttaggtagatagatagatatagttagttagttaggtcggtagtatagttcgaattgtaaattttattttttttttattttttttttaattgtttagagttagcgtttgtggttttcgggttggtgtttcgggagtgtttagagagtttggtttttagtcgttttcgggaggagagttttgttgtttaggcgttgttgatagcggcggaaagtagcggtatttacgcgttcgtcgggggaagtcggcgagcggttgtagtagtaaagaattttttcggttgggaggatcggagataagtggtagagtttcggagttaatttttgtaagttttttttgcgttttaggtttttttacggcggtaaagattagaaggcggcggagagttacgtaagagaagaaggacgtgcgtttagtttcgttcgtatcggttgttgaatttgggcgagcgcgagtcgcggttgtcgggcgttttttttttttagtagcggaggaggggataagtcgtcggagttcgggcggttaagattcgtcgtcggtcggttattgtagggttcgtattgattcgtttcgcggggagagtcgttgttttgggaagtgagttcgtttgcggatttcgaggaatcgttgcgtacgaagagcgtttagtgagtgatcgcgattttttaaagtcgggtagcgcgcgcgagtcgataagtaagagtgcgggaggtattttaattaattttgcgttttttggagcgagttggtgaggagggcgtagcggggacgatagttagcgggtgcgtgcgtttttagagaaattttttttgttaaaggtttcggggggcgcgggtgtttttcgtttgttatagttttgttgcggtttcgaaatttgtgcgcgtagtttaaattaattttacgtgaagtgacggattgttttatgattgtaaagatggaaacgattttttatgacgatgtttttaacgtttcgtttttttcgttcgagagcggattttatggttatagtaattttaagattttgaaatagagtatgattttgaatttggtcgatttagtggggagtttgaagtcgtattttcgcgttaagaattcggatttttttatttcgttcgacgtggggttgtttaagttggcgtcgttcgagttggagcgtttgataatttagtttagtaacgggtatattattattacgtcgatttttatttagtttttgtgttttaagaacgtgatagatgagtaggagggtttcgtcgagggtttcgtgcgcgttttggtcgaattgtatagttagaatacgttgtttagcgttacgtcggcggcgtagtcggttaacggggtaggtatggtggttttcgcggtagtttcggtggtagggggtagcggtagcggcggttttagcgttagtttgtatagcgagtcgtcggtttacgtaaattttagtaattttaatttaggcgcgttgagtagcggcggcggggcgtttttttacggcgcggtcggtttggtttttttcgcgtaattttagtagtagtagtagtcgtcgtattatttgttttagtagatgttcgtgtagtattcgcggttgtaggttttgaaggaggagttttagatagtgttcgagatgttcggcgagatatcgtttttgttttttatcgatatggagttttaggagcggattaaggcggagaggaagcgtatgaggaatcgtatcgttgtttttaagtgtcgaaaaaggaagttggagagaatcgttcggttggaggaaaaagtgaaaattttgaaagtttagaattcggagttggcgtttacggttaatatgtttagggaataggtggtatagtttaaatagaaagttatgaattacgttaatagtgggtgttaatttatgttaacgtagtagttgtaaatattttgaagagagatcgtcgggggttgaggggtaacgaagaaaaaaaataatatagagagatagatttgagaatttgataagttgcgacggagagaaaaaagaagtgttcgagaattaaagttaagggtatttaagttggattgggttgcgttttgacggcgtttttagtgtgtacgagtgggaaggatttggcgcgtttttttttggcgtggagttagggagcggtcgtttgcgggttgtttcgttttgcggacgggttgttttcgcgcgaacggaacgttggatttttcgttaatattgattaagaattgtatggatttaatattcgattttatttagtattaaaggggggagggggagggggttataaattgtaatagagattgtagattgtttttgtagtattttttaagaatataaagcggggggagggttggggaggggcggtaggagggaggtttgtgagagcgaggttgagtttatagatgaattttttttggtttgttttcgttaattgtgtatgtatatatatatattttttaatttgatgaaagttgattattgttaataaatagttttatgtttttgtaagttattttttgtttgtttgtttgggtattttgtttagtgttgtttgtaaataagagatttggagtattttgagtttattatttgtaataaagtatataatttttttatgttttgtttttgaaaattttagaaaggatatttaagaaaatataataaattattggaaagtatttttttaattttttttttgtattatttgtagatattagttatttaggtggagttgaaagagttaagaatgtcgattaaaattatttttagtgttttttattattaagtagtaaaaattgttttttattagattttagaaataaatgtatttgatgtatttgatgttatggttaggttatatttttttttttttagttatttatatggaattgtttattaaaggatagtgcgatgttttaggaggttggaggaaggggggttgtagtggagagggatagtttattgagaagttaaatattttaaagtttggattgtattaagtggtatgtgttgtgattatttataatgttagtagaaattttataataggtgtttatttttaaagtaggaattggtggtagattttataaaagatgtatttttttaatttggaattttttttttgataatttttagataaaaagatggtttttgtttatgaatatttataatagtatttttgttataataaatgtatttaaatattaataatagattttgaattgtttttttttattatttttttttttttaagttatatattgaagtttttatttttagttgttgaggttaatattgttgtaatttgaagtgatttgaaaattaagaagtaaagaatttaggaagagttaaattagaagttgtgatttgaatgaaatagttttttaattttattaattttttttttttttttttatttttatttttttttttattattttatttttaaataaatttttatgtttatggaaattaatagtttagtattttgggtttgtttgtagtttattttttaatttgtttttaaaataattaattttgtttaaatatagaataagttttaaaagatagtaatttaatattatggaaaagatttataagagaaaatatgaattagtattaatttaatgattatatgcgtaaattaaattttagttttggggaaatgggaaatttgaattttatttatagatataatttaggagattaataaggtagtgtttaataagggaataattttttgtttggttgttttttatattaagagttagtgtgattattaggtagtaaaagtaatttgatatttaggaatattttataaattattaattgagttagggttgtttgtttattagtagtgttttagtatttagtaggtttgggagtgttaatattttgtttgtggttgtaaatttaaatatataaagagtttttttttaggagtatatttaggagtggaagagattggataggtttgttagtttcggattttttgtaataatattttttgaataaagggttattgggagtagagtttagtttgttaaattgaatttgtcgatgttagtaattcggaaggtgagatgattttgattatatgtagaaatagtagagggataataaagtattttggggtggggttttgtggaagttaaataagagttaattagaaaaaataagtaggttggggaattaattatttgtaaagg

SEQ ID NO: 188 - DNA, 9254 bp, Artificial Sequence
  chemically treated genomic DNA (Homo sapiens)
tttttgtaggtaattaattttttagtttgtttattttttttagttggtttttgtttagtttttatagagttttattttaaaatgttttattgtttttttgttatttttatatatggttaaaattattttatttttcgggttgttgatatcggtaaatttagtttggtaaattgggttttgtttttagtaattttttgtttaagaagtgttattataaaggattcgaagttaataagtttgtttaattttttttatttttagatatatttttaaggagaaattttttgtgtatttggatttatagttataggtaggatattagtatttttagatttattgggtattagaatattgttaatgagtaaatagttttgatttaattagtggtttgtgaaatatttttggatattaaattgtttttgttgtttgataattatattggtttttggtatgaaaagtaattaagtaaaaaattgtttttttgttaagtattgttttgttgattttttaagttatatttgtaggtagaatttaagttttttatttttttagagttgaggtttgatttacgtatgtaattattgagttagtattagtttatgtttttttttgtgaattttttttatagtattagattattattttttgagatttattttatatttaaataaggttgattattttagaaataaattaagaaataagttatagatagatttaaaatgttaaattgttagtttttataggtataggggtttatttgggggtgaggtagtagagagagagatagagatggagaaagagggaaagaattaatgaaattgggagattgttttatttagattataatttttagtttgattttttttaaattttttgttttttaatttttaaattattttagattgtagtaatgttaattttagtaattaaaaataaaaattttagtatataatttgggaagaaaaaagtagtaaagggaagtaatttaagatttgttattggtatttgaatatatttattgtgataagaatgttgttataaatatttataagtaaaggttatttttttatttaggaattgttaaagagaagattttaaattggaaggatatattttttgtaaaatttgttattaatttttgttttgagaataagtatttattgtaaaatttttattaatattataaatggttatagtatatgttatttgatataatttaaattttgaaatgtttgattttttagtgggttgtttttttttattgtaatttttttttttttagttttttgaaatatcgtattattttttggtaagtaattttatatagatagttgggggaggaggagtataatttgattatagtattaggtatattaggtatatttatttttaaagtttaatagagaatagtttttattgtttaatagtaagaagtattgagagtgattttaatcgatatttttaatttttttaattttatttagatagttagtatttatagatgatgtagaaaagaggttaggggagtattttttaatagtttattgtatttttttaaatattttttttggaatttttagaaataaaatataaaaaaattatatattttattataaatggtaaatttagagtgttttaaattttttatttataaataatattgggtaggatatttaaataaataaataagaaataatttataaaggtatgaagttgtttattgatagtaattagtttttattaaattaaaaaatatatatatgtatatatatagttaacgaaggtaggttagaaagagtttatttgtaggtttagtttcgtttttataaattttttttttgtcgtttttttttaatttttttttcgttttgtgtttttaaggagtattatagaagtaatttatagtttttattgtagtttgtaatttttttttttttttttttttaatattgaatgagatcgaatgttaggtttatgtagtttttggttaatgttaacgaaaagtttaacgtttcgttcgcgcggggatagttcgttcgtaaagcggggtagttcgtaggcggtcgttttttggttttacgttaagggagggcgcgttaagttttttttattcgtgtatattgggggcgtcgttaggacgtaatttagtttaatttggatatttttggttttagttttcggatatttttttttttttttcgtcgtaatttgttaagtttttaagtttgtttttttgtgttatttttttttttcgttgttttttagttttcgacggtttttttttaaaatgtttgtaattgttgcgttagtatgagttggtatttattgttaacgtggtttatgattttttgtttaagttgtgttatttgttttttgagtatgttggtcgtggacgttagtttcgagttttgagtttttaaggtttttatttttttttttagtcgggcgattttttttagttttttttttcggtatttggaggtagcgatgcggttttttatgcgtttttttttcgttttgattcgtttttgggattttatgtcgatgggggataggggcggtgtttcgtcgggtatttcgggtattgtttgaggttttttttttagggtttgtagtcgcgggtgttgtacgggtatttgttggggtaggtggtgcggcggttgttgttgttgttggggttgcgcgggaaaggttaggtcggtcgcgtcgtaggagggcgtttcgtcgtcgttgtttagcgcgtttgggttgaagttgttgaggtttgcgtagatcggcggttcgttgtgtaggttggcgttgaagtcgtcgttgtcgttgttttttgttatcgaggttatcgcgggagttattatgtttgtttcgttgatcggttgcgtcgtcgacgtgacgttgggtagcgtgttttggttgtgtagttcggttagggcgcgtacgaagttttcggcgaagtttttttgtttatttgttacgtttttggggtataggaattgggtgggggtcggcgtggtggtgatgtgttcgttgttggattggattattaggcgttttagttcgggcgacgttagtttgagtagttttacgtcgggcgaggtgaggaggttcgagtttttggcgcggaggtgcggttttaggttttttattgggtcggttaggtttagggttatgttttgttttaggattttggggttattgtagttataaggttcgttttcggacgggaggaacgaggcgttgagggtatcgttatagaaggtcgtttttatttttgtagttatagaatagttcgttattttacgtgaggttagtttgggttgcgcgtataagtttcggggtcgtaatagggttgtggtaagcgggggatattcgcgtttttcggagtttttgatagggaaagtttttttaagagcgtacgtattcgttggttgtcgttttcgttgcgttttttttattagttcgttttagggagcgtagggttaattaagatgtttttcgtatttttatttgtcgattcgcgcgcgttattcggttttgaaaagtcgcggttatttattgagcgtttttcgtgcgtagcggtttttcggagttcgtaggcgaatttattttttagagtagcggtttttttcgcggagcggattagtgcggattttgtagtggtcggtcggcggcgggttttggtcgttcggatttcgacgatttgttttttttttcgttgttagggggagggggcgttcggtagtcgcggttcgcgttcgtttaagtttaataatcggtgcgagcgaagttgagcgtacgtttttttttttttgcgtggtttttcgtcgttttttggtttttatcgtcgtggagaagtttaagacgtaggaaaggtttgtaaaagttggtttcgggattttgttatttgttttcggtttttttagtcgggaaagttttttgttgttgtagtcgttcgtcgatttttttcggcgggcgcgtgggtatcgttgtttttcgtcgttgttaatagcgtttgggtagtagggtttttttttcgggggcggttggagattaggttttttggatattttcgaaatattagttcgggagttataggcgttagttttgggtagttagagagaaggtgaaaagaaaataagatttgtagttcggattatattgtcgatttggttggttggttgtgtttgtttgtttgtttgatttcgcgtatttttattttcgtttcgttgttttagttatatttagtgtaattttgagtttttatttagttcgagtttaatatttatttgttattagttaatttttaaaaatagtttatgatgttattttaaggtttttttattggttcgcgtcgtttttaggggggcgggttcgttcgttattatggagattttattttagaagatttttttttgggttcgcggaggtttacgggatgaggtaatgtttcgttgtttttttatagtcgggttttttttttttttatttttttttttgtcgtacgtttttcggttttttttttttcggtttttttttcgggtcgtttttttcggttcgttcggtgtattgtgggttgacgttttggggtttgattgtttagtgacggtggttgtcgcgagcgggcggacgttcgtaatttttgatggaggggggtttaagtttacggttgcggacggggatgcgggggatgtagggattcgggaggttagggaatttggttagttgttttgggttaggggtgcgggcgaggggtggttgttgtttttttatttgtggggttcgaagttatttatcggcggtcgttatcgcgcggggttggaggttgagaatttaagtacgttgttattttttcgtattttcgggggggcgggaatatcgtttttaaggtggttttgtgaagttttaggtgggggcgagtttaaggggatttaagtttaggggcggtttttcgagagtcggttttttacgttgagaatatttcgaagtttgtatttcggttaagtttaggagcgacggttcgcggggtcgtttggttgttcgtagaagtcgagagatttgtattgttcgaaattggacgtttagttgagttttcgttgtattttattttatttttcgggatcgtgggggaaagggcgcgggggtttatagttttgtttcggaggggtagtttttatagtgggcgtaattggtgggtaatagggtttagatgggaataagcgtgtaggcgattcgaaattcggggaatttcggtgttagtttattttttttttcgttttcggataatacgtatacgtttaatataatacgtataatataacgcgcgcgcgcgcgtatatatatattttattcgcgtcgagttgttttcgggaaaataagtttagaaggcggcggatattcgtataaagttacgtagtagtattcggagttcggggtagaatttggattttaaatttttgtattttcggtcgggtggtgggcgtatattttgggtagtttttaggaagcgttagatatatgtaagtggtttttttttcgcggttattttatttttttttcgttttttattttttagggacgaaagtgtgtggtggaaagaatttcgaagtcgggaattttggttttttcgtggttaggttattatagtgtgaagtaagtaaattacggaattttttcgagttttattttttttatttgtaggtggggtcggtgtcgtttattttattgggttgttaggagttagtgtgatagggtcgtttgtagtattagggaggtggtggttaaatagttcgttttttttttttgtttcgtagtttttattttcgtagagtttggataggatgttaggatataagagtgcgatttggtaggattaggtgtatttttttgtgagaagtatcgaggggaggaggggagggggaatcgggttagaagttagattttttttaagtttttgtttaaaattggggtttgaagttggatttgtagtagtttaagtttttaggttttaaatttagatttcgttgtttttgaatttggaatttagttttgggtttattgtttttagttttaaggtatttgcggttttgagtgtttagaaattaatagtagttggtattagtgggaaatttgttaatttttttttatttcgggtatttatttagtttttattgatttgtagagggtaattgaaagtttattgtgagttaggtattgagttggggagggggtggggtaggtaggtatatagtgatgataagatttagttgtttttttaaggagagaatatttttttttgtttgttgttttgaattattttttgttgtatttagggagttggtgttttaaatattttttaataatagtaataaaaattagttttatgtattaaatatttattatttgttaggtatttttttaagtaatttaaatacgttgttttttttttataattgttttgagagatatatattattatttagatttaatatgtgaggaaataggtttagagaggttaagtatttttgttgaggttatataggtagttggaaattgattttaggtttgtgttatatttttttgtattttttttattttggtaaatttttttgtggagtattagttatttgtagaggaaatagcgtttgtggtatagaagaaatttttttgtttgattttttgattgtaatttcgtttagagtttttgtatttagaaattttaagatttaggattttgtataaatatatattttttgtttaaggttttgtgtgtttttttttgttttatgtggtttagtaggttgattttttttttatgttgagaaatagtatattttatttaaaaaaataataaatttgtttatgttaacgtttttgtttggaagtttttattggtttttttttataattaggagagtttcgatttttatgttttggagaaggggttttttataatttaattttttttttttttagttttattttttatttttagttttgttaggaaaggtagtgttatgttgttttaataaataattttaatatattagtggtttattttagtgaaagttggttatttttgttatatgatcgttgtaggttggtagggtagttttgtttattgtagttattaaagggtttaggttgaaggaggtttcgtgttgatatttttttttatagttattttgattgtggggaaggaattcggaatattatggttgttagagtatttatttatggtatatattatttttgtttatatattattggttaaagtagttatatggttatgtttttttagattattataattttattaggtgttttaaagggttttttaggaatatttggggaataatattaaagattttgtttttttttttgtttattaaatgtttggtttatttttttttttttggtggaatttttttattttttatttaagggaaataattttaaagatttatttagttatagtattaagttgttttgtttattgttttttatgatttttggatttgttttcggagagttttttttttttatagttaaagtaggtattggaaaatatgtttttaaataagtttttaaaagttggggagatgtagagtgatattaagttttgaatatgtgtaggtaggttttttatttatttgatatgaggtgttttatgtgataatagttataaagtttttttttagatatatttttttggtttgttatatttttttgtttttttgtttttttgtttgttgatttttttgttttttttttgtcgttttatttttttgttttttatttgattttgagtattttgggtttattgggttttgatgggagagttagatttttttttttttttttagagttattttgtttagttgaaagtatatattgggtaagattttaattgatttttttttttttttttttgagacggagttttatttttgttgttttggttggagtgtaatggtatagtttcggtttattgtaatttttatttttcgggtttaagcgatttttttgttttagttttttgagtagttgggattataggtatgcgttattacgttcggttaattttgtatttttaggagcgataggatttttttatattggttaggtttgtttcgaattttcgattttaggtgattcgtttttttcggttttttattttgaggttttaatagtaggtttatattttgtgatttgatttttattttaaagtttagttttttttaggtttttttttgttaaaagtattttttgattttatattttattagtcgggattgggaaataattgttttttttaacgatgtaaatttttggatttataggttttttttattttattttatttttgattgtaaataggttaaatttttttgagtttatttttgaatagtttgtagtaatttttagaatgtatttaatagttattaatatatattatttattttttgttttataatttttttttttagtttattaggtttatgatttgttttttatattattataggtgatatgtttattaaatagattattatttttttagtttttgatagtagtgtttttagttatcgttttttaaatgattgtttagttttattgttgttatgtttattgttgttattatattaatttatatttaggagttaatttttatatgagttaggatggtttaggttatgttgttataataaataattttaaaattttagtggtttaaaaataaattttatattttgtttatattatatgtttaattttacggggttttgtttaatgtgtttatttagaaatttagtttgaagaaggttttattttgatatatgttttaataattatcgtattagtttggtaggggaaagaaagtatggtgaatttatattggttttaaaagtttttttttaggaatgatattttttattgtatttatatattattggttaaaattagttatatggttatgttttatttaaagggtgtaggaaagtgtaattttattaggtattcggaagttaaagagttggaaatgtatatttttatatattttaggttatgttgtgttagttatttaaaaattttattgggttataattatagaattgttttttatttatattgtatgtttatttatatggtttggttgtgtttttatttaaattttattttgaattgtaataatttttatatgttaaaggtggggttaggtggagataattgaattatggggttagtttttttta

SEQ ID NO: 189 - DNA, 8244 bp, Artificial Sequence
  chemically treated genomic DNA (Homo sapiens)
ttttaaatatatttattatttcgacgggttataataatttttttggacgttaattttcggggacgttaaaatatattagtttcggcgggtttttttagatttatattatgtggtttggggttttagatgtgtttttttttaggttttggatagttttatatattttttttaggttttatagatttataggttattaattcgggttttttaattttaaagacgaagtttttggttcgtggtggtcgcgttgattaatttgtttggttttttaggatgtggatagtgttttttttatatttaggtattgtttttaaaataagtggaattttttcgtataattttgaatattaattttagggttttttaagtttattgtttttcgtatacgttcgttttatttcgcgtttttttattttattttcgcgttttttttcgtttattttagtatgggatatttgttgttgggtttcgtaaatttatttatattaatttgggttttttaaattttatacgttgaattttaagttttttatgatatttagtagggttggaaggttggaatttttagagtatgaaaattgttttttatatttttttttaaattcggttattatatttagagtatgttgaatttttttttgaattataaacgatttgttttttgattgtttgagttttataaaatggagggatttttttagtgattttttaaagttattgagaatgttgtgggtgtgtgagttataaagttttggggtattaacgtttatggttttatatgttgtttggttacgaattaggttttttaagatgtagatagtgttatttaggtttttggagtatattgagtagttattaggaggtgtttaagtgtgatttaggattttttaggtttttttaaattatatagggtttttcgggtttttttgggttatattaagtataaaaggattttttgggtagagtttatttttatttttgttatgttaggtgttgttaacggttttagtttttaaatatttcgagtattttttttgtattataatatattgattattaaataattttttgggttttaggagttttataataagaattttgtttttttaaaatttaggtattggtttgaaattttaacggttaggattatattggattttttttttggttttttatatttggatgttttggacgttgttttttaggttttttaggaatatttagtattgttttcggattataggatagtattgattttttgggttttaaataatttattgagttattttaaagttaagtaatattttttttaaatatattgtatattttttattataaaatttgaaaatttttaagttttaagatttaggaattttgaattttttttttttaaaatgtatatatggatttttaagttttttaaggattttgagtaatttttttagatttttagatttaaaaacgatttttttggagtttttaaattgcggtattgttttttagttttttaaagtaaattgagatttttttttttttataaaataattgaggttttttttttttttaatattgatttatgagttttttgattttatggtttttgttttgggtttttttatatttagaaaatgttttatggatttttaaagtatattaaaaaatgtttttgggttttaagaaattttaggtatggaaaaatttgcgatttataagttttttagttattaattaggtttttagaaatttagatattaaatttttattgggtaatttttatgtgttttaaaaatttgaaatgtgttttattggggtttttttaaatgtagacgatatttaggaaaatatatagttttttttttatttattaaaaataagttaatggaaattatttaaaaattagtatagaaaaataatattgattttatatttttttattttttattttgttttttttaaatgtattgattatattttaggtttttttaaaatttagatagtgtttttttttatttttgaagggtgttaaaatttttttttgaagttatagtaattatgaaggttatttttttttcggttgttgttagcgtttaggttattaatttatatttttaagatgtgaaaattaattttagtttttttttaatatattaagaatgtgtttggatttttaaaatgtgttttttgtttttatttgttaattttacgtaatatggttttacggtaaaatttttaattttatatggagaattttttttaattatttttttttataaattggttttttaagttagttggtttttatttgagatttttttttttatgtttttaattgtatggagtaattttttttattttttaaatttgtaatttatttttttggagtttcgagtttagttattaattacggtttttatattaacggagttttcggggtttttttttttaggatatttattcgttaagttcgtaaggtagaaagaattttgttttgcgttttttaaaatttgggtattgttttcggttcgtcggttatttattgtagtttttttaatttcgcgtatagcgggtattggtttcgggtttttttgttttttacgaagtttttagagtaattcggatttgggaaatttttttttagcgttgtttaaatatatttgggtcggtcgcgcgtttttaggacgtggatagggagggttttttcgtgtttaggaaagcgatcgggtattgtttttagttttttttaaatttgggtattgttttcgggttttttaacggattgggcgttgttttcggatattgaggattggtttcggggtttcgtttatttttagtagcgtttatcgtttgttatagagcgttcgatcgttcgttgtttgagtttttggtgcgttcgcggacgtagtttttagtttcgcggtgagtttttcgtcgcgtcgatttttttcgtttttgcgtttttgatcggttttcggttcgtatttgttgttgtttcgtcggtgttggcgttcgttttcggttgtcgtcggggaggtcggcgtggggcgcgggatacggttgcggatttgcggttggcggttgcgttcgtttttgttgggcgtttcgaaattcgcgttattttcgtttgtttattgtaaagattttattcgtggggaaagcggttggagggttttaaagtggggcgggtagggggttggggcgagggacgcggaggagaggcgttttcgtcgggcggtaaagtgtttttagttcgcgggtttaggatttcgtcgggaggcgcgcgcggagcgcgggcgaagtgattgatggcggagcgaggggggcgaggggggttaggggggcgcgagatttcgtcggcggttttttttttttggttaggtttaggcggcggggggttggcggggtgcgggattttgtgcgtggtttttgatttggtaaaaattatagtgtttttttatatcgtttaaattttttaggagatggtttttttagatttttaaattatcgtggtggttttcgagatcgaattcgcgtttatgtaagtttaacgtattgaggacggggtaattattatttagatattttgggtgggtcgtaaaggcgagttatttagacgtatttcggtgagttcggttatgtaggtaggatttgagttgtgtttttcgttttgatttttttttttttggcggtcggagttttcgtaggttttaagtttggtttagattcggttcggcgtagtcggtttttcgcgcgtttcgtatttggcgggggtttcggggtttcggcgcggtatcggggggcgttcgggatttggttgaggttttaagcgtcgcgtggtcggttttttttgttggggtaggtggcggttgcgcgtttcgttcgagtttaggggtttttttagtcgtaataattagtaaggatttttcgatttagttttaagttatttgtatttgtatttagacggggcgtattcgtagtgtagttttttggtggggcgttgggagttcgtttgtttttgtttgttcggagattttagtttacgagtataggtcgttcgggtattttagaaattcgggatggggtttttgaattttttagaacgggtatttagtatggttttggcgttttgcggttttttgttttttatttagtttcgttttcgcgtattttttagtttttgcgatcgtcgttttttttttcggggttttagggtttttagttcgtatttttcgtttcgtttttggttcgggttgcgggggcgggtcgggggcggggcgagggtttcgcgggcgtttattggcgcgggcgcgaggttagcgaggttcgcgcgggttttgggtcgcgggttggcgcgattataagagtcgggcgtgggcgttcgtagttcgtttgtttttcggcggagttgcgtgaggttcggtcggtttcggtttttttttttcggtcgttttcgttttttggtttacgtttgttcgcgttttgtttattagcgtttttatcgggtaaggcggtttcgcgtcgacgtcgttcgttgtttcgttgttgattttcgtttcgggcgtcgttcgcggggtcgcgtttcgtcgggtttgcggatttttcgtcgttttttttttatttattttaattttttttattttcgtttcgttcgaggaggcggtttttttcgtaggtagttcggttcgtaggtcgtcggcgttgttatttttttcgcgttttttttttagtttttttttcggcgcgtagtttcgggtcgttttttttttcgcgttgcgtttcggagcggtttcggtgtcgttatcgtttgtttttttttcgaggttcgggttcgcgacggtagagggtttcgtcggtttaaatcgagttgggcgttcgcggttcgggtgtagtttttatttcgttttttagttatcgtttttttcggtttttcgacgtggcgttttttttttcgtttttttgtgtttttcgcgttttttttggcgtttggtttcggttttcgttttttttttcgtaatttttttttcgttttttttcgttttttttagtttttagttttcgatttttttttttttttacgttcgttttttcgttttcgtcgaattaaagtggattaattatacgttttttgttttttttcgtgttgttttttttcgttgtgcgtttgttcgtttttcgttgttttttttttttttcgtttttttttcggttttttttttttacgtttattttgttttttttattatttttgtttttttttatttttgatataatagttgattttatttttcgatattttttttttttcgaaaagtataatatttggttcgttttagttcgaagatagttcgttttttttggataattagacgaattttttttttttttttaaaaaaaagttattttttcgttttgtttcgtcgtatattcggttttcgcgattcggttagagcggcgttggtagaggagtgttcggtaggagggttaacgttcgttgttcggtttgcgatacgtagtagggaggtgggcggtagcgtcgtcggtttttaggtaagcggcgtgtgcgggtcgggtcggggtcggggttggggcggcgcgggtttgcgtcggacgttcggtttttttttcgttcgttttcggttcggggtttgcggggttcggcggggcggttgagttcgggggggaggaggaggaggaggaggaggacggacggttgcgggtttcgttttttgcgcggagtttcgcgtttattttggcggcggagttgggggtggggtgggggcgtcgggaagggtcgagggaggtgtgaggtgtttgtaggggcgatttttcggtcggtttgtgggtgtagggggtgtcgttttatatgtgtgattcgtgttttgcgggttttggttttcggggtgttgggtaacgaggaggggcgcggagtcgtagaagtttattttggtatgttgacgcggtgttagcgagatcgcgagaggaagacgggggtgggcggggttaggatggagaggggtcgagttggtaggagttatggtagacgttatattcgcgatattttttttatattttttttggttttgttcgtaatatttttaaataggagtttcgggagagggggagaggggttgttggtttgaggttaagaagggtagagttttcgattcggagagaggtcgcggtttttgtttagtgggtagcgtggaagtttttatataaggaggtgggaaggagattttttttttttttattgttttgtgtagagatgagtcgggggtgtaggatgggagtttatggtatttcgttacgggatggtttagggttttcggttgggggtgtaggagagaagagattggttgggaggagggagagggcgggagtaaaggcgcgggggagtggttagtagggagaggggtggggggtagggtggagttcgggttgggaggagtcggtttatatataaaagttgaggtattgattagtttgtaaattggatattagttttttttgtgaaagagatttttagtttttttttttttttttttttttttttttttttgttttagcgagttttttgttgagttgtaggtaattagggttgtggagtgaggattttcgttgttattttattttagtttgaggtagggtagtagggggtacggtttacgtttgggtttcgggttttgtagtcgttagttcgttgtttttcggatagtattttttttttttttttttttttgtttttgtttttatttggtttttgtttttttatttgttttttttttttttgtttttttttttcggttttttttttgtttagtttagggttttttttgggtttttatttgtttcgtatcgttgtatgttttttgttttgttttttgtcggttttttgattcggatttttaagtttagagtggtggggtttgttgcggaagcgcggcgagggttagagtggttagttggcggagtgtgtttttagaatttggaagggggtggtagagggggcggtgagaggattggttagggtttagttaaggagatgattaaggaggtttttagattttcggcgtagttgtttattagtttttagagagggtatgtaaagttgtgtttttgttttattgtttgtttagtcgtttatataatttattgtattaaaaatttttttgggtttgcggagcgaaggttggggttgttcgtttggagggttttattttttgtaggggtagggttaatttgttgtggtggttttcggttttttattttcgagtgggttaattcggttttgtggttttgtagtttgtggagggggtgtgttttaagattggtttttttttttagattgtagtttggggaatttggtgtcggattttttaggtggtttgagttggtttttttagtttttacggggagagtttggtagcgtaaatagggagatgttttggaggtttttggttttattggttcgatttgaggtttggaaaggaggttttgggcgtgtgtgtgtgtgtttgggggtatttaaggtagattggagttggagaattgggtgattgggaaaataaggtttttagagtatgggtggcgtggttgtgttaattattggagtttttgatttaggtttggtttagttgtagattggaaaggtggaaaagttagggggaggggcggggttggtttagtaggattggtttgttgttttgagggcgatggtttttttggattttttttgtttagttgggggttgtggggaggaagggattggtttttttggatgtatatgttttgtaggggtggggttgtttgttattttggttggcgttggaggtttgagaagtggcgatgtgacgttgggttggttttgtttttatggtgttataggacggaggttaggtcgggtgtttagtttgggtttttgtagttgtggatgtcgttgagtttttgtaataatgatcgtggagatggttatttttcgtgtaaaattattagtgttttttgtaaatggaaggaattgggttttttttgtgtgtttttggacgttttattttgtatatggttttgcgtttttatttcggtattatgatttgtgtgttatttttgtaataaaaataatgtttataggaaagtcgtgtttttaatttttaattgaatttgtaggttggtaaatttggtttgggaggggtatttttggtttggggtttggtttggttgtttcgtttacgttatttttttttcgtttttaga

SEQ ID NO: 190 - DNA, 8244 bp, Artificial Sequence
  chemically treated genomic DNA (Homo sapiens)
tttgggggcgggagagaagtggcgtgagcggggtagttaggttaagttttaggttagaggtgttttttttaaattaaatttgttaatttataaatttagttgaaaattgaaagtacggtttttttataaatattatttttattataaaagtaatatataggttataatgtcgaggtgagggcgtagggttatgtgtagaatgaagcgtttagaagtatatagaaaaggtttagttttttttatttgtaagaagtattagtaattttatacgaggggtgattatttttacggttattattgtaggagtttagcggtatttatagttgtaggggtttaggttggatattcgatttggttttcgttttatgatattatgggggtagggttagtttagcgttatatcgttattttttaggtttttagcgttagttaagatggtagatagttttatttttatagagtatgtgtatttaggaggattagtttttttttttttataatttttagttgagtagggggggtttaggaggattatcgtttttaaagtagtaggttagttttgttgggttagtttcgtttttttttttggtttttttatttttttagtttgtagttgagttaggtttgggttaaggattttaatggttaatataattacgttatttatgttttagaaattttgtttttttagttatttagttttttaattttagtttgttttgggtatttttaaatatatatatatacgtttagagttttttttttaggttttaaatcgaattagtaaggttaggggtttttagaatatttttttatttgcgttattaaatttttttcgtgggagttggagagattagtttaggttatttgggaagttcgatattaggttttttagattataatttggaaggggaggttagttttaggatatattttttttataggttgtagggttatagggtcgggttaatttattcgggggtgggaggtcgggagttattatagtaagttggttttgtttttgtagaaggtggaattttttaggcgggtagttttagttttcgtttcgtagatttaggggagtttttgatgtaataaattatgtgagcgattgagtaggtagtgggatagaagtataattttgtatgttttttttaaagattagtgggtagttgcgtcgaggatttgaaagtttttttggttatttttttgattggattttggttagtttttttatcgttttttttgttatttttttttaaattttaagagtatatttcgttagttggttattttagttttcgtcgcgttttcgtaataagttttattattttgaatttggaggttcgggttaggggatcggtagaaagtaggataggaagtatgtagcggtgcggagtaggtgagggtttaggaaaagttttgagttgggtaaggagggggtcgaagggaaggaatagaaagggaaggagtaggtgagggagtagagattaggtgggggtaggggtagaggaaaagaggggaggggggtgttgttcgagaggtagcgggttggcggttgtagggttcgaggtttaggcgtgggtcgtgttttttgttgttttgttttaggttggagtgggatggtagcgggggtttttattttatagttttggttatttatagtttagtagaaggttcgttggggtaggaggaggaggaggaagaggaggaggaggaagttggaagttttttttataggagaagttaatgtttagtttgtaggttggttagtgttttagtttttatgtgtgagtcgattttttttagttcgggttttattttattttttatttttttttttgttgattattttttcgcgtttttgttttcgttttttttttttttttagttagtttttttttttttgtatttttaatcgggagttttggattatttcgtagcgaagtgttatgggtttttattttgtattttcggtttatttttgtatagggtagtgaagggggggggggttttttttttatttttttgtatggaaatttttacgttgtttattgggtaggggtcgcggttttttttcgggtcgaaggttttgttttttttagttttagattagtagtttttttttttttttttcgggatttttgtttggaaatgttgcggatagagttagagggggtgtgggggagatgtcgcgaatgtggcgtttgttatgatttttgttaattcggtttttttttattttggtttcgtttattttcgtttttttttcgcggtttcgttggtatcgcgttaatatattagggtgggtttttgcggtttcgcgttttttttcgttatttagtatttcggaggttagggttcgtaaggtacgaattatatatgtgaggcggtattttttgtatttatagatcgatcgggaagtcgtttttgtagatattttatatttttttcggtttttttcgacgtttttattttatttttagtttcgtcgttagggtgagcgcggggtttcgcgtagggaacgggattcgtagtcgttcgttttttttttttttttttttttttttttcgggtttagtcgtttcgtcgagtttcgtaggtttcgggtcgggagcgggcggaggaagggtcgggcgttcggcgtaagttcgcgtcgttttagtttcggtttcggttcggttcgtatacgtcgtttatttggaagtcggcgacgttgtcgtttatttttttgttgcgtgtcgtaaatcgaatagcgggcgttggtttttttgtcggatatttttttgttagcgtcgttttggtcgagtcgcgggggtcgaatgtgcgacggggtagagcggggggatggtttttttttggggggggggggagaattcgtttgattgtttagggaggacgggttgttttcgggttggggcgggttagatgttgtatttttcgggggggaaaaggtatcgggaaatgaggttagttgttgtattaaggatagaggggggtagagatagtgggagagatagagtgaacgtgaaaggggggggtcgaagagagggcgagggggagagaggatagcgagaggcgggtaggcgtatagcgggagagaatagtacggagagaaatagaaagcgtgtaattaatttattttggttcggcgaaggcgagagggcgggcgtgagggggggagggagtcggaggttaggagttgggggggacgggagggagcgaagggaaggttgcgggagaaagagcgggggtcggggttagacgttaagaggggcgcggggagtatagagaagcggagggaagggcgttacgtcgaggggtcgggggaggcggtgattggggggcggagtggaggttgtattcggatcgcgggcgtttagttcggtttgggtcgacggagttttttgtcgtcgcgagttcgggtttcgggagggggataggcggtggcggtatcggggtcgtttcgggacgtagcgcggaaaggggagcggttcgaggttgcgcgtcggggggagggttggagggggagcgcggggggggtgataacgtcggcggtttgcgagtcggattgtttgcggggggaatcgttttttcgggcgaagcggggatggggggagttgaggtagatgaagaggaggcggcggggaattcgtaggttcggcggagcgcgatttcgcggacggcgttcgggacgggagttagtagcgaggtagcgggcggcgtcgacgcggggtcgttttgttcgatggaggcgttggtgggtagagcgcgggtaggcgtgggttaggaggcgggggcggtcggaaggggggggtcggggtcggtcgggttttacgtagtttcgtcggagagtaggcgaattgcgggcgtttacgttcggtttttatagtcgcgttagttcgcggtttagggttcgcgcgggtttcgttggtttcgcgttcgcgttaatgggcgttcgcggagttttcgtttcgttttcggttcgttttcgtaattcgagttaagagcggggcggggggtgcgggttgggggttttggggtttcgggggggggggcggcggtcgtaggggttggggggtgcgcgggggcgaggttgggtggggggtagggagtcgtagagcgttaaggttatgttgaatgttcgttttagagaatttaggggttttatttcgggtttttggggtgttcgggcggtttgtgttcgtgagttggggttttcgggtaggtaggggtaggcgggtttttagcgttttattaggaggttgtattgcgggtgcgtttcgtttgagtgtagatgtaggtggtttggggttgagtcggggggtttttgttggttgttgcggttgagggggtttttgggttcgggcggggcgcgtagtcgttatttgttttagtagaaggagtcggttacgcggcgtttggagttttagttagatttcgagcgtttttcggtgtcgcgtcggagtttcggagttttcgttaggtgcgggacgcgcggaaggtcggttgcgtcgggtcgaatttgggttaggtttggagtttacggaggtttcggtcgttagaggagagaggattagggcgggaaatatagtttaaattttatttgtatggtcgagtttatcggggtgcgtttaagtagttcgtttttgcggtttatttaaaatatttggataatggttatttcgtttttagtgcgttggatttgtatagacgcgagttcggtttcgggggttattacgataatttgggggtttggggaaattattttttggagagtttgaacgatgtaagaaagtattgtgatttttattaagttaaaaattacgtataaaatttcgtatttcgttagtttttcgtcgtttaagtttagttaaggggaaggggtcgtcggcggaatttcgcgtttttttggtttttttcgtttttttcgtttcgttattaattatttcgttcgcgtttcgcgcgcgtttttcggcggagttttaggttcgcgggttagaggtattttatcgttcggcgggagcgtttttttttcgcgtttttcgttttagttttttgttcgttttattttgggattttttagtcgttttttttacgaatgagatttttgtaatgagtaaacgaaagtggcgcggatttcggggcgtttagtaggagcgagcgtagtcgttagtcgtaagttcgtagtcgtgtttcgcgttttacgtcggttttttcggcggtagtcggagacgagcgttagtatcggcgggatagtagtagatgcgggtcgagagtcggttaggggcgtagaggcggaggggatcggcgcggcggggagtttatcgcgaagttggaggttgcgttcgcgggcgtattaggagtttaggtagcgagcgatcgaacgttttgtggtaggcggtggacgttgttgaaggtgagcgagatttcggggttagtttttagtgttcgggagtaacgtttagttcgttggaagattcggggataatgtttaaatttgggggagattgggggtaatgttcggtcgtttttttggatacggggaagttttttttgtttacgttttgagggcgcgcggtcgatttaagtgtgtttgggtaacgttagagagaaattttttaaattcgagttgttttggggatttcgtaggagatagagaggttcgaaattagtgttcgttgtgcgcggggttggggaagttgtagtgggtggtcggcgagtcgggaataatgtttaaattttggggaacgtaaggtagagttttttttgttttgcgggtttagcgaatgggtgttttggaggaggggatttcggggatttcgttaatgtgggaatcgtgattaatgattaaattcgagattttagaaaaatagattataggtttgggggatgagagaagttgttttatgtaattgggaatatagagaaagaggttttaaataggggttagttagtttgggggattaatttgtgaggaggggtagttaaagaaaattttttatatgaaattgggaattttgtcgtagagttatattacgtaaaattggtagatgaaagtaaggaatatattttggggatttaaatatatttttggtgtgttagggggaagttgagattaatttttatattttaagaatataagttagtggtttggacgttggtagtagtcggggaaaaaataatttttataattattgtggttttagggaaaggttttaatattttttagagatggaagaaagtattgtttagattttgggggagtttggagtgtgattagtatatttggggaaagtaaaataaaaaataaaaaaatataaaattagtattatttttttatgttaatttttaaatgatttttattagtttatttttggtaaataagaaaaagattatatatttttttggatgtcgtttgtatttgggggagttttagtgaaatatattttaagtttttgggatatatggaaattatttaatggagatttgatatttaaatttttggaaatttagttagtagttaggaaatttataggtcgtaggtttttttatgtttgggattttttgggatttagggatattttttagtgtgttttgggggtttatggaatattttttaaatgtagggggatttagggtagggattataaagttaggagatttataaattagtattaaaaaaaaaaaaaattttaattgttttgtgaagggaaaaaaattttaatttgttttggaaggttgggagataatatcgtaatttgggggttttaggaaaatcgtttttgaatttaaagatttagggaagttgtttagagtttttggaggatttgggggtttatatgtatattttaaagaaaggggatttagaatttttaggttttaggatttaggaatttttagattttgtgatagggagtgtgtagtgtgtttgaaggaaatattgtttaattttgagatgatttagtgggttgtttggagtttaagaaattagtgttgttttgtgattcgagggtaatgttgaatgtttttagagggtttggagggtagcgtttagaatatttaagtatgggggattaggaaaagggtttagtgtgattttggtcgttggggttttagattaatgtttgaattttagaaaagtaagatttttgttatgaagtttttgggatttagagaattgtttaatagttaatatgttgtgatgtagagaaagtgttcggaatgtttgggaattggggtcgttagtaatatttggtataatagaaataaaagtaggttttgtttaaggggtttttttgtgtttggtgtagtttagagggattcgggagattttgtgtgatttggggggatttggagaattttgggttatatttgagtattttttggtaattgtttagtgtgttttagggatttgggtggtattgtttatattttaagggatttgattcgtggttaggtagtatatagagttatagacgttaatgttttaaagttttgtgatttatatatttataatatttttaatagttttggggaattattggggaaatttttttattttatgaaatttagataattagagggtaggtcgtttatgatttagaaaaggatttaatatgttttgggtgtaatgatcgaatttgggggaaggtatgggaagtaatttttatattttgagggttttaattttttagttttgttgagtgttatgagggatttgggatttaacgtgtaaagtttagggaatttaggttagtgtgaatagatttgcgggatttaatagtaaatgttttatgttgaggtgaacgggaaggggcgcgggggtggggtgggggggcgcggaatggggcggacgtgtgcgggaaatagtaagtttaggagattttggagttaatatttaaaattatgcgggaaagttttatttgttttggaaataatgtttaaatgtggaaaaggtattgtttatattttggggagttaggtaaattggttagcgcgattattacggattaagggtttcgtttttaaaattagggaattcgggttagtggtttgtaaatttgtgggatttggagggggtgtataaaattgtttagagtttgggagaaagtatatttggggttttaggttatatagtgtaagtttggaaaagttcgtcgggattgatgtgttttgacgttttcggaaattaacgtttaagaaaattattgtgattcgtcgaaatggtgaatatatttagaa

SEQ ID NO: 191 - DNA, 16842 bp, Artificial Sequence
  chemically treated genomic DNA (Homo sapiens)
ttttttaaagtgttgggattataggcgtgagttattgtatttggtttgttatttatgtatttatttttttttgagataagtttttgttatgttgtttaggttggttttaaatttttaggtttaagagatttttttaaagttttgggattataggtgtgagttattgtgtataattttgaagtggttaattttaataatatatttattttagtttaatatatttaaaattatattattttaatatgtaattattattaaaattattaatgagatattttattttatttttatttatttatttttttgagacggagtttcgttttgttttttaggttggagtgcggtggcgcgattttggtttattgtaagtttcgttttttgggtttacgttttttttttgttttagtttttcgagtagttgggattataggtgttcgttattacgtttagttaatttttgtatttttagtagagattaggttttattacgttggttaggatggtttcgaatttttgatttcgtgattagtttattttggttttttaaagtgttgggattataggcgtgagttattgtgtttggttagtgagatattttatttgtgttttttttttttttttttgagatcgagttttattgtgttgtttaggttgtagtgtagtggtataattttggtttattgtaatttttgttttttaggtttaagcgatttttttattttagttttttgagtagttgggattataggcgggcgttacgatatttggttagtttttgtatttttagtagagacgggggttttattatgttgtttaggttggttttgaatttttgattttaggtgattatttgttttggttttttaaagtgttgggattataggtaaaagtcgttatattaggtttatttttttttttttcgagacggagttttattgttgtttaaggtggagtgtaatggtaagattttagttttttgtaatttttgttttttgggtttaagcgatttttttgttttagttttttaagtagttgagattacgggcgttcgttattacgtttggttaatttttgtatttttagtagagatagggttttattacgttggttagattggttttaaatttttgatttcgggtgatttattcgtttcggttttttaaagtgttgggattataggtgtgaattatcgtgtttggtaggtttatttttaatttttttaattttggaaatttagtgtgtagggtaggtatggtgttttatgtttgtaattttagaattttgggaggtcgaggtaggtggattatttgaggttaggagttcgggattagtttgaataatatggtgaaattttgtttttattgaaaatttaaaaattatttagttatggtggtgtatgtttgtagttttagttattttagaggttgagataggagaattgtttgaatttgggaagtagaggttgtagtgaattaagattatgttattgtattttagttcgggtaatagagcgagatttcgttttaaaaaaaaaaaaagagagttagtgtggagggaagtgtttttgttgggttcgggtgttttgtgggattttgaggaaaagttcgtattaggtagatgttgttttgtttttatgggtaaaggatattttaataaatcgaggagtaaaatgttttcgtatgtttttttcgcgtagatttgttaggaagagtataagaagaaatattcggatttttttgttaatttcgtggaattttttaagaagtgtttggagagatggaagattacgtttgtaaaggagaagtgaagtttgaagagaaggtaaaaagtgataaagttcgttgtgatagggagattaaaaattatattttttcgaaatgtaagaaagggtaagaaaggaaagaaaaaggatcgtaatgtttttagaaggttattatttgttttttttttgttttgttttgaatatcgtttaaagattaaaagtggatatttaggtttatttgtcgtggaaattgtaaagaaattgggtgaaatgtggtttgggtagttagttaaagataaataattatatgagtagaaagtagttaagttataggagagatatgaaaagggtattgttgtatatcgtgttaagggtaaaagtgaagtaggaaagaagggtttaaagaagaataaattagaagatgaggaggaggaggaggagaaagaagatgaagatgaggaggaagagggtgaagatgaagaataaatggttattttttaatgatgtttgtgtagtgggtttgttttgttaagaatgtgaattttagtatagtttagtattagttttagtataaaattgtataaattttcgtatagtttataagattttttgtatagaaaatattttttttttttttttttttttttgagatagagtttcgtttttgttgtttaggttggagtgtaatggcgtgatttcggtttatcgtaattttcgtttttcgggttttggtttaagtagtttttttgttttagttttttgagtagttgggattataggtatatgttattacgtttagttaatttttgtatttttagtagagatggggttttattatgttggttaggttgtttttaaatttttgatttcgtgattcgtttgtttcggttttttaaaatattgggattataggtgtgagttatcgtattttgtttaatgtttttaaatatttaatggtttttaaaaaatttattgtgtatggtagtatagtatatttgtaggaattagtattaatagtatattttgcgttttttaagatgttgtattttttaatattttgtaataaaattatgcgtattaaaaaaataaagaaatttcgtgtgtagtttatatttatagtatattttcgtttaggtatttgagagaatgattaggaggggtttttggaggaggtggtttttgaacggagaatttatttttaaggattttgtttgtaatggttattaagtattttttgagttatttttatgtgttttgtagttttttgaaggggcgtgggatttatcgatgttaattatttagtattatttttagattttaagaagttggggtgtgagttagtaattagtatagaaaagagatattaaaataagtttgagttggggagtgtttttttaattttagttttttggaagagattttttttttttttttgagatagagtttcgtttttattgtttaagttggagtgtagtggtacgatttcggtttatcgtaatttttttttttcgggtttaagcgattttttttttttagttttttgagtagttgggattatagatatgtatttgtaatttttattaaaaatataaaaattagtcgggcgtggtggcgtacgtttgtaattttagttattggggaggttgaggtaggagaatcgtttgaaattaggaggcggagattgtattaagatagtttgttttagttaaataatttggcgttagtgtaggaaaaggtggaaggtacggggttagtataggagggtttaatatttttaattttattaagttatattttggtaatttttgttttttacgagaagttttcgttgggtttgttttagcgttgttttgaggttttttttatgagtttcgatagggtagaggtcgttttgagcgttttttttttttttggtttaagagtggtttaaaagaaggatttttgattggaattggttattttgtgttattttttgatttttgatttcgttttaaagggggatgcgggggaggggttttggtaggggtggtttcgttttttttaggttcgtaagtttaggttttcgtttatcgggtttagtttattttgcggtcgtttagggaggtcgttggtattcgtgatttacgatttttttttcgagttttatcgaggttatagtcgtggtttcgtttttttatgtttgtttttcgttttttgttcgtgacgggcgttttcgaggattaatgagcgcgttgtatttatttttcgggcggggttaagcgtcgattaatcgtcgttcgggcgttcggtcgggtttaaacgttttaatcgttagcggcggcggggcgggtagagggtcggggatggtaggtttaattaacgggtgggtacgtcgttttcgcgaggaggcgtgttttgcggtcgggcgtgcggtgttcgcggcggcgtagggagggggagggaggtaaataagatggcggcggcgtgtcgggcgcggaagggggaggcggttcggggcgttcgcgagtgaggcgcggggcggcgaagggagcgcgggtggcggtatttgttgtcgcggttttggatgggttgggtttttttcgtcgtttcgttttttttatacgcgcggcggtcgcggcgagggggacgcgtcgttcggggttcggtattttcgggaatttttcggttcggagtttgcggtttgcgtcgtttcggtcgtcgggagtttcgtggagttttcgtcgtcgcgtcgtttcgcggatcggacgttgagggtattcggggcggggcgcgcgttcgggtagacgtttgcggggaggggggcgtttgtcgggtttcggcgattattttgggggtcgcgggtcggttcggggggcgtttagtgcgggttttcgcgggcgtcgggtagcgattagttttgagcggagttgttggtcgcggcgggaggtttttcggacgtttttagtttttcgaacgttcgttcgggtcggcgggagtcggcgtttttcgggaggttcgttcggtcgttcgcggcggagcgtttgtttttgggataggcggtgggatcggggcgtcgtcggagacgtttttagcgaagttgggttttttaggtgtgggggtttcggggggtagcgacgtcgcggattcggtttgtgggatgggcggttcggagaagattgcgttcggtcgtgtttatatttgttcgtgggtttgaggttttcggaggatgatttagtattgaaaagtttcggtcggtttttttagggttttcgaggacgaagttgattttgatcgggtcgttttttagttttgaggttcgggttttattggaattcgcgtttgagtcgtcgtttcggattttcggtgttcgtcggttcgtagattttgtatcgggtttggattcgtagtcgggattgacgtgtagaataatcgtttttgttggaagaagggttttttttttttttttggggtttttgttgtttttttttttttttttttttttgtaaaattttggagaagggaagtcggaatataaggaaggatcgtttattcgcggatttagggttggcggcgggattttaggattttgggtttagtatggaggtggtggattcgtagtagttgggtatgtttacggagggcgagttgatgtcggtgggtatggatacgtttatttatcgtatcgattttatcgaggttatttattagtcgcgtcgtaagcgggttaagtttatcggtaagtatttgatgggggatttgttgggggaaggtttttacggtaaggtgaaggaggtgttggattcggagacgttgtgtaggagggtcgttaagatttttaagaagaagaagttgcgaaggatttttaacggggaggttaacgtgaagaagtaagtatggtttgttggggtcggggtcgggtcgggttagttacggtgttgatggttttgttttttttttttttttttttttttttttttttatttttttttaatattttgagttggattcgtttggcgtttgtgtttttcgtgttagggagagcgtggttgggggtttgcgttacggatttttatttaggtaaggttagttgtcgtagcggggcgtgcgtttgtatgggtttttggattttagttaaaatgttttggtagcgaaatttttttgagaagggagcggtttttaattttttaagattagttttttggtttttttagttgtttaaggagtagaggcgtttagtggaattagtttgtgtttgtttgggtttcgagagtttgtgtgcggtcgttaatacgttttttgcgtagtgtgtggtcgttatcggggttaggcgaaatgtgatttgtttattttgttagaggggaattttgggttgttaaaaataattgtttgtatcggtttattagttagtaggagggaaacgtagtttttttttatttgttagggatgtgacgttggaagtatttttggttttcggggttggaagttttgttcgagggggattgtgtttttttttcgaattgtattcggaagattttatttttttaattgatttttttaggtacggggttgtcgttgggtatttcggacgtttttgtatttgtgcgcggagaagtttttatttagggtagtattggtcggtttgagttttttttagttggtgggggtggtcgggggtgtttttgttttatcgtagttagatacgttgtatttgtcgtcgtttggcgggttttgtttaggttttgttttttttttagtttttttaatttttaaaattttgttttttgtttttaagaaaggattttatttgttgggttaggtttcgagggattggtaaggatattttgcgtagggtattatgattttggaaggaggttcggggaggggttgttgcggtgtttgtttttattttttttttgtttaggggttttggggtttttgtcgtgtttgtttttattttttttttgtttaggggttttggggtttacgtatatttttttttttttttttttgagacggagtttcgttttgttttttaggttggagtgtagtggcgcgaattgggtttattgtaagtttcgtttttcgggtttatgttatttttttgttttagtttttcgagtagttgggattataggtattcgttattacgttcggttaattttttgtattttttagtagagacggggttttatcgtgttagttaggatggttttaattttttgatttcgtgattcgttcgtttcggttttttaaagtgttggtattataggcgtgagttaacgcgtgcggtttttttttttttttttttttttttttttgagacggagttttatttttgttgtttaggttggagtgtagtggagtggttttggtttattgtaattttcgttttttgggtttaagtgattttcgtgttttagtttttcgagtagttgggattataggtgtttgttatagtgtttagttaattttttttttttttttttagtagagacggggttttattattttggttaggttggttttgaatttttgatttcgtgatttatttgttttagttttttaaagtgttgggattaaaggcgtgagttatcgcgttcggttagtacgttttttaattagtatgtaggttgtgatatgcggaaattaggggtataggttttgaagtttgtattttggagttggagtagttagggttaaatgggagcggttgggaagggtgtgtttttacgaggtttttttgatgttttagtgtttagtttggattcgggtagaaggtgtggttagtgttttgagttagtggagtagttgtttgtgtttggtttttgtgagatgggttggttaggggttaggtagagtttgtgtttggtttttgtgagatgggttggttaggggttaggtagagtttgtgttgggggtagtaggtgttttttaaaggggttagtgatagttttttttttagtagtgagaaatttacgtttaggggtcgggcgcggtggtttacgtttgtaattttagtattttgggaggttgaggtgggtggatcgtttgaggttaggagttcgagattagtttggttaatatggtgaaattttatttttattaaaaatataaaagttagtcgagtgtggtggcgtgtgtttgtaattttagttattcgggaggttgaggtagaatattgttggagtttgggaggcggagtttgcggtgattcgagatcgtattattgcgttttagtttgggcgatatagcgagattttgttttaaaaataaataaataaataaataaataaataaataaataaataaatttggtttgagttttgataaatgtatatgtagggttaatgggaagatagacgttggagggtggaagtttgattgtgagagtgagttttttgtttttttgaatagttagtggaggaggttttgggagtttaggtgagtatttgaacggtagggtagagtttgagggttttggtggagataggtaagaaggttgtaggaatttagtttggtttagtgtttgggagaacgggagggaatacggaggtagggaggtagaggggttggtaggatttggattggattgtgcgtcgtagttatttatagtttgattttattgttttgaagtgagtgatgtatttttattagtgtttagcgtttaattttattttggttttgagtgtgtaacggttttgtttttgcggggttttttgggatgaggggtgagttttgtttttttttggttattgtttgttattaggagttgtttcgtttatagttgtgatttaggagttattgtattttttttagttttttgggtgttgttagggggtttttttattttgggagttggtgtgttttgattggaggttgttatgtgtagagtgttgttaaggagaaggggtgtttattgtttagttttgaggtttaaggttttggttagttttgttgttagcgttgtagggaaaaagttttttttgtgtgtgggaagtttaataaatttcgtttagattgtgtttcgtagcgagtgtttggaattttttagataagttttaggcgttcggttttttagttggtgtggaaagcgtgggcgattattaaggggggtgggttggggtagatggagtcggcgtgagtttcgttttttttttttttttttagaaaggtagttttggagtttatgttttgtttcgtttttatcggtaaaaagtataattttattagaaataggaaagttttaaaaagtattaatgagttaaaaagagggttgggtatgttcggttatgtttgtaattttagtattttgggaggttaaggcgggtggattattcgaggttgggagttagtttgattaatatggtgaaattttgtttttattaaaaatataaaattagttgagtgtggtggcgtacgtttgtaattttagttattttggaggttgaggtaggagaattatttgaattcgggaagtagaggttgcggtgagttaagattatgttattgtattttagtttgggtaataagagtgaaatttcgtttcgaaaaaaaaaagggttggggtcgggcgtggtggtttacgtttgtaattttagtattttgggaggtcgaggcggtttgattataaggttagaagtttgagattagcgtggttaatatggtgaaattttttttttattaaaaatagaaaaattagttaggtgtggtggtatatgttaataattttagttattttatttgaggttaggagtttaagattagtttggttaatatggcgaaatttcgtttttattataaatataaaaattagttaggcgtggtggcgcgcgtttgtagtttagttattggggaagttgaagtaaggagaatcgtttgaatttgggaggcggaggttgcggtgagtcgagatcgtattattgtattttaggttgggtaagtttaggagagaagagcgaaattgtgttttaaaaaaataattaattaaaataaaattagtgttataggttgtttttggtaggtagtgggtttttagggtggagtagggaagggttggaaagggtcgtttgtgtttagttcgatttttcgtgtttttcgggggatagtacggttagttgttgttgcggagtttatagtggggttttgggggggggggtgtaggtagaaggtcgttatgtttttttttttttttttattttagtgagagtgggttcgaaggtagggagtttgttcgttttgtggagttttcgtagaggtatttagggttgtcgtgagcgtatagtttggcggtgttttacggttttgtttttttttgttatttttatttgttgtaaaatattgtgttttcgtattttttttttttatttgtttggaaatgtgaaaattattgttgtcgtaggaaacgggtttagattcgggttgtggtttttttattcgtatcgttttcgcggtgtttagttaggaggtgggaggtgggcggtatttagtgtgtttggttgcggcgatgattggtagatgtttggatttatggtaaagaggattttcgcgagttgggagttagttttggattttgtaggtttttatattttaggcggtttttatggggttttagtatttgttgaggtttttgcgttagttatgtgaggtttgggtgttttcgaggtttttgtttgtgtttttttttgggtagcgggagggagagttttgagatttagagggagtttaggggttgggtagtcgtagaatagcgggggtaatgggtttattgggggttttgggttgtgtatatagtgggttttcggtgtttagttagttggggtaggtttggaatgttggttttttttttaggatttggggcgttgttgtagttgtcggggaattagtgaggcggttggacggttcgtatattttataaacgttatcgtattgtttaaattggatttaatttttttaatatttttttttttttttttttttttttttttggagatagggttttattgtatcgtcgaggttggagtgtagtggcgtaattatagttttgggtttaggtgatttttttgtttttaaggtagttgggattgtagatgtgtattattatattcgattagttttttgtagagatggggtttcgttatgttgtttaggttggttttaaatttttagatttaagttattcgtttgtttgggttttttagagtgttgggattataggtatgagttattgtttcgttacgtttatttttatttatttatttatttatttttgagacggagtttcgttttgttttttaggttggagtgttgtggtacgattttggtttattgtaagtttcgttttagttttttaagtaagttggaattataggtgtttgttattaagtttggttaattttgtttttgtatttttagtagagacggggttttatcgtgttagttagtatggtttcgattttttgattttgtgattcgttcgtttcggttttttaaagttttgggattataggtttgagttattgtgttcggtttatttttttattttttattttatagagataagggtttgttgtgttgtttaggttggttttgaatttttgattttaagtaattttttttggttttttaaagtgttgggattataggtgtaagttatagtattgggtttaaagtttattttttttttttttttttttttttttgagatggagtttcgttttgttatttaggttggagtgtagtggcgtgattttggtttattgtaagttttgtttttcgggtttatattatttttttgttttagtttttcgaatagttgggattataggcgtttgttattatgttcggttaatttttttgtatttttagtagagatggggttttattgtgttagttaggatggtttcgattttttgatttcgtgatttgtttgtttcggttttttaaagtgttggggttataggtgtgagttatcgtattcggtaaagtttatttttttaaagtgtgtaatttagtggtatatagtatattgatagagttgtataattattatttttattagtttttagaatatttttgttattttagaaggaaatttcgtttttgttagttattattttttattttttttttagtttcggtatttacgtattttttttttgtttttggattggtttgttttgaatattttatacgagtggtgttatatatcgcgtggttttttgcgttcggtttgttttacggagtgtgttgtttttaaggggtattcgcgtcgtggtttgggttcgaatttttttgttgtttacggttgcgttattttttagtgtgtggagggttacgttgcgtttgattgtttatttgtggttggatatttgggttgttttcgtttttgtttgtgaattgtggttgttttggtgtacgtgtgtttagtcggcgtttttttagaatttttgagggttttgttttagttatattaggagggatttagggattagggtacgcgggtttggagttgggtgtttttgggtttttatgtgttttttagttttgttttgagtcgtgggaggtcggggcgagggttaggtttattttttttttgtatgatttgtttttaggtagacggaggtttttagttttatttttttgtgagtttgagtggcgtttatgatttttttttttattttttgttttgttaattaataagttagttaaatagtttatgttgtttgggtaagtttagtaggtttttaacgtggtatttcggagcggttggcgatgttttaagagtcgggttttttttttttggaggttttttttgtttttcgttaagtttttaggtttcgttgggtttttttttttgttttttttttggttggagacgttagaggaagtttggcgatttagagaagttgatgtgtatttattatttcggaggtgattgttattaggcgggggtggttttatttttattttttttttggtataaatcgggggacgtacgtgtttgcgtagaatgttttggttttttttaattaaatagataatttagtgttttttggtttatgttgatttgtttaggagtgtttgggtttttttacgttttagttgttgtgtgttttgttgttgtgaagtgttttcgttgaggtggaggtagggtagggcgttttcggtgagggcgagtttttttgtgttcgtttttttatttgtagaatgatggtttatggaggagatatggtgtcggtaggtggtggtcggcgtagggaggtttttaggagggagttttttatttttatttgtttttagggtcgtgtagtttttcgagcggtttttacgaggttttgaggttgtatgtaggttgagtttttggttttattgtttttttttagggttaggattgtgttggagtttgggtgggtgtggggtggtttttgtataggtagtaggaggtgggttagagcggtgttggatttgaaggttcgtggtttttttagttttattgaggaggttggaatagtgttttgggttattttttttgtcggtagtcggtttttgttgagggagggggtgttttcgttttttggtggagtattaggtttttggggtttgtgcgttcgagtatttggtttttgttgtttgaaaatagtatttttttcgtttttcggttatcgtattttttttgaatagaaggtaagttttgttttttaggaatggtttgtgatttttattagcgggggaggttaggggtatatagagttttggggaataaggggatttggggttgagtcgggtttttcgggtttatttcgagtttttttgagtagtttggtaggtaggaaggcgttgggtttcggggtttttgtcgagtttagttttatttttagcgttttttttaatgttttgggtgtttgttaggttgtggatataggttttggttagttttataaataattttgtcgggttttgttgggaattggtgttattattatatagtttagagagaacggaaatatagggttttttagcgagtagattaggtttgcggtgattagtggaagtgggggacgtttttagggttgggtagttcgatagggtatcgggtatagttaggggtcggaattagttgtttattggtttcgtttttgggggattgtgtttttttgtgtttcgtttttattatattttgttttttttttattttgtttttttagtttttttttagattggcggttttttgtttaggtttagttttagtatagtttgtagttttggtagagtttaggttttggttttttgaggttgttttgagggtagtgagtaatgagttttgggattggtgtattgggagggaaaggtgagttaaggttttttgtaagaggtagttttgagttgggggtggggaaggttgggtcgtgggatatttttgatattttaagttttttttttgagatggagttttgttttgttatttaggttggagtgtagtggtgagatttcgattttttgtaattttcgttttttaggtttaagcgatttttttgttttagttttttgagtagttgggattataggcgtttattattacgttcggttaatttttgtatttttagtagagataaggttttattatgttggttaggttggtttcgaatttttgattttaggtgatttatttcggttttttatagtgtcgggattataggcgtgagttatcgcgtttggttttttagttgttttttatgttttatgtttgggttttttgttaagaattaaaaaagaaaaaaaaaattatggagatggaatttatatattgtataatttattcgtttatagtgtataatttagtggtattaagtatatttatacggttgtgtaattattatttttaattttagaacgttcggttattttaaaagtaagttttatttttattgtgttattttttattttttttattagtttttggttattttgaatttattttttggttttggattggtttgttttggatattgtatagaaatgggattttgtcggtcgggcgcggtgatttacgagagtaagagatttagattattttggttaatatggtgaaattttatttttattaaaaatataaaaattagttgggcgtggttgcgggtatttgtagttttagcgatttaggggttgagttaggagaaatcgtttgaattcgggaggtagaggttgtagtgagttgagattatgttattgtattttggtttggcgatagagtgagatttcgtttttaaaaaaaaaaaaataagaaatgggattttgttattttagcgtttttcgaggtcgaggtgggtagatgatttgagtttagtagtttaaacgagattagtttgggtagtacggtgaaattgtttttattaaaatataaaaattagttgggtatggtagtatacgtttgtagttttagttatttgcggggttgagatgggaggatcgtttgagtttgggaggtgtattttagtttgggcgatagggaaattttgttttaaaaaaaaaaaaaaaagtgtattatatattgtgtgttttttagtgttttattgtgatatttttaaggtgtagttaggttgtggttcgagttagagttttattggtttttgtggttgagttttgttgagtgcgtggatgggttgtgttgattttcgtttgtggaagggtttttgggtggttttatatttcggttgttgtgcgttttgttgttgtgagtatttcgtgtttcgtttttgcgtggcgtgtattgttttttagggtgtgtatttgggagtggagttgttggtttatagggtaatagatttttggagaagttgtagacgtttttacgtttatttattgggtgtgaggattttgtttttcgttatttttgtttttgtttaatttttttttttatgagatagggttttattttgttgtttaggttggagtgtagtagtacgattataggtaattataggtttaagtgatttttttatttgagtttttcgagtagttaggatttgaggtacgtatttttatatttggttaatttttgtatttttagtagagatagggtttcgtcgtgttgtttaggttggtttcgaatttttgagtttaggtgatttattcgtttcggttttttatagtgttgggagaaatgaagtgtttgcgatagggcggtagttgtagagggggttgtgttttttggtttgttgtgttttatttttgtgataggtaggtgggcgtggttaattgggcggtagttgtagagggggtagtgataggcgggtgggtgtggtaggattttataatgtttttttttgtggcgttttttttttcgtttgtttttttttatgggttatttttttagtttatttgcggtttattttttaaggagtgggattttcggagttgggagtttttggttgcgtgggattgtattgtgtgacggagttattattagggttttaatttattttggtttttgttatagtttgggttttatttgtgttattattgtagtagtttggtttttaggaagtaaaattgttattgagttataaagtttaattaagagtgttttttgggaggtcgaggcgggcggattataaggttaggagatcgagattattttggttaatatggtgaaattttgtttgtattaaaatataaaaaaattagtcggttgtggtgatacgtgtttgtagttttagttattcgggaggttgaggtagggaaattatttgaatttgggaggtagaggttgtagtgagttgagatcgggttatcgtgttttagtttagggatagagtaagattttgttttagaaaaaaaaaaaagtgttttaattgtgttttttaaagttttcgtcggtcgatgatagattagagggcgttgtgtttttattttttatcgttttgagtttggacgcgtggtttttgtagggtttttttttatagtattgtgaatttatagtttttttttagggaagggaggaggtacgttatttttatagggagatggggaggtcgattttagggatttaggttattattttgacgttgggtcggttgatatatttttgttttttttgttttagg

SEQ ID NO: 192 - DNA, 16842 bp, Artificial Sequence
  chemically treated genomic DNA (Homo sapiens)
tttgggatagagaggataggggtgtattagtcgatttaacgttaggatgatggtttggatttttggagtcggtttttttatttttttgtggaagtggcgtatttttttttttttttagagagaagttgtgagtttatagtgttgtgggaaagggttttgtaggggttacgcgtttaggtttagggcggtagggggtgggagtatagcgttttttagtttgttatcggtcggcgagggttttggaggatatagttaggatatttttttttttttttgagatagagttttgttttgtttttaggttggagtacggtggttcgattttagtttattgtaatttttgttttttaggtttaagtgatttttttgttttagtttttcgagtagttgggattataggtacgtgttattatagtcggttaatttttttgtattttagtatagatagggttttattatgttggttaggatggtttcgattttttgattttgtgattcgttcgtttcggttttttaaaggatatttttaattgagttttgtaatttagtaatagttttgttttttagaaattagattattgtaatggtagtatagatggagtttagattgtggtaggagttagggtgagttggagttttggtgatggtttcgttatatagtatagttttacgtagttaagggtttttaatttcgagggttttattttttggagggtgggtcgtaggtgagttggaaggatggtttataggaaggggtaggcgaagaaggagacgttatagaaagagatattgtggggttttgttatatttattcgtttgttattgttttttttgtagttgtcgtttagttggttacgtttatttgtttgttataagggtggggtataataggttagagagtatagttttttttgtagttgtcgttttgtcgtagatattttattttttttagtattataggaggtcgaggcgggtggattatttgagtttaggagttcgagattagtttgagtaatacggcgaaattttgtttttattaaaaatataaaaattagttaggtgtggaggtacgtgttttaagttttagttattcgggaggtttaggtgggaggattatttgagtttgtagttatttgtgatcgtgttattgtattttagtttggataatagaataagattttgttttataaaagaaaaaattaaataaaaataaaaatgacgaggagtaaggtttttatatttagtgggtgggcgtggaagcgtttgtagtttttttaaaggtttgttattttgtgagttagtagttttatttttaggtatatattttgaggaatagtatacgttacgtagaaacggagtacgagatgtttatagtagtaggacgtatagtagtcgagatgtggaattatttaggggtttttttatagacgaggattagtatagtttatttacgtatttaataagatttagttataaaaattagtgaggttttgattcgagttatagtttagttgtattttgaggatgttatagtgagatattaaaggatatatagtgtgtgatgtatttttttttttttttttgagatagggtttttttgtcgtttaggttggagtgtattttttaggtttaagcgatttttttattttagtttcgtaagtagttgggattatagacgtgtgttattatgtttagttaatttttgtattttagtagagatagttttatcgtgttgtttaggttggtttcgtttgaattattaggtttaagttatttgtttatttcggtttcggaaaacgttgggatgataggattttattttttgtttttttttttttggagacggagttttattttgtcgttaggttagagtgtaatggtatgattttagtttattgtaatttttgtttttcgggtttaagcgattttttttgatttagtttttgagtcgttgggattataggtgttcgtaattacgtttagttaatttttgtatttttagtagagatggggttttattatgttggttaggatggtttggattttttgttttcgtgagttatcgcgttcggtcgataggattttatttttatgtaatatttaggataagttaatttagagttaggaagtggatttagagtggttaggagttggtggaggggatggagagtgatataatgggaatggggtttgtttttggggtgatcgaacgttttggaattagaagtagtggttgtatagtcgtgtgaatgtatttaatgttattgaattgtatattgtgaacgaatgagttgtatagtatgtaaattttatttttatagtttttttttttttttttaatttttaataggaagtttaagtatggagtataaaaaatagttggggggttaggcgcggtgatttacgtttgtaatttcgatattatgggaggtcgaggtggattatttgaggttaggagttcgaaattagtttggttaatatggtgaaattttgtttttattaaaaatataaaaattagtcgggcgtggtgatgggcgtttgtaattttagttatttaggaggttgaggtaggagaatcgtttgaatttgggaggcggaggttgtagagagtcgagattttattattgtattttagtttgggtgatagagtaagattttattttaaaaaaaaaatttggggtgttaggggtattttacgatttagttttttttatttttagtttagggttgttttttgtaggaagttttggtttattttttttttttagtgtattagttttagggtttattgtttattgtttttagggtaattttagaaggttaaggtttgagttttgttagggttgtaggttgtgttggggttgggtttggataaggggtcgttagtttggggaggggttaggagagtaggatgaagggaaagtaaggtgtgatggggacggggtatagagggatatagttttttagaagcggagttagtgagtaattggtttcggtttttggttgtgttcggtgttttgtcgggttgtttagttttgaaagcgttttttatttttattggttatcgtaggtttggtttgttcgttgagaagttttgtgttttcgttttttttgggttatgtggtggtggtattaatttttagtagggttcggtaaggttatttatagaattggttagggtttgtgtttatagtttggtaggtatttagggtattgagggggacgttgagggtgaggttgggttcggtaaaggtttcggggtttagcgtttttttgtttgttaggttgtttaggagagttcggggtgggttcgagaggttcggtttagttttagatttttttgttttttagggttttgtgtgtttttaatttttttcgttgatgaaggttataggttatttttgggaggtaagatttgttttttatttagaggagatgcggtggtcggggggcggggaaggtgttgtttttagatagtagaggttagatgttcggacgtataggttttaagagtttgatgttttattaggaggcgaaagtatttttttttttagtaggagtcggttatcggtagggaaggtggtttaggatattattttagtttttttagtggagttgagggagttacgggtttttaggtttagtatcgttttggtttattttttgttgtttgtgtagggattattttatatttatttaggttttagtatagttttaattttgaggaggggtagtgaggttaggagtttaatttgtatgtagttttagagtttcgtgggggtcgttcgggaggttgtacggttttaaaagtaaatgagggtggaggatttttttttggaaatttttttgcgtcggttattatttgtcgatattatgttttttttatgagttattattttatagatggggaaacgggtataggaggattcgtttttatcgaaggcgttttgttttgtttttattttaacggggatattttatagtagtaggatatatagtagttgaaacgtggaagagtttaggtatttttgagtaggttagtatagattaagggatattgggttgtttgtttaattaaaagggattaaggtattttgcgtaggtacgtgcgtttttcgatttatgttaggggaggagtgggggtggagttattttcgtttggtggtagttattttcgggatgatgggtgtatattagtttttttagatcgttaggttttttttgacgtttttagttagaaaaagagtagaagaggaggtttagcgaaatttaagagtttggcgaggaataggaagagtttttaggagggggaagttcggtttttggggtatcgttagtcgtttcgaggtgttacgttaggggtttattgggtttgtttaggtagtatggattgtttagttgatttgttgattagtaggataggaaataggaaggagagttataaacgttatttaagtttatagagaggtggggttaggagttttcgtttgtttagaaatagattatatagggaagagatgggtttggttttcgtttcggttttttacggtttagagtaggattgggaggtatatggagatttaggaatatttagttttagattcgcgtgttttggtttttgaattttttttgatgtggttgaaataaggtttttaaggattttagagggacgtcggttgagtatacgtgtattaaagtagttataatttataggtagaggcgggagtagtttaagtgtttagttatagatgagtagttaaacgtagcgtggttttttatatattggaaagtgacgtagtcgtgaatagtagagaggttcggatttaggttacggcgcggatgttttttgaggatagtatatttcgtgagataagtcggacgtaaaaggttacgcggtgtgtgatattattcgtgtgaaatgtttaggataggttaatttagaggtaggaagggaatgcgtgggtgtcgggattggggagggaatggggagtgatggttgatagagacggggtttttttttggggtaataagaatgttttggaagttgatagaggtgatagttgtgtaattttgttaatgtattatatgttattgaattatatattttaaaaaggtgaattttgtcgggtgcggtggtttatatttgtaattttagtattttgggaggtcgaggtaggtagattacgaggttaggagatcgagattattttggttaatatagtgaaattttatttttattaaaaatataaaaaaattagtcgggtatggtggtaggcgtttgtagttttagttattcgggaggttgaggtaggagaatggtgtgaattcgggaggtagagtttgtagtgagttaagattacgttattgtattttagtttgggtgatagagcgagattttattttaaaaaaaaaaaaaaaaaaaaaaaaggtgaattttaggtttagtattatggtttatatttgtaattttagtattttgggaggttagagaggattatttaaggttaggggtttaagattagtttgggtaatatagtaagtttttgtttttataaaataaaaaataaaaaggtgggtcgggtatagtgatttaagtttgtaattttaggattttgggaggtcgaggcgggcggattataaggttaggagatcgagattatattggttaatacggtgaaatttcgtttttattaaaaatataaaaataaaattagttaggtttggtggtaggtatttgtagttttagtttatttgggaggttgaagcggagtttgtagtgagttaagatcgtgttatagtattttagtttgggggatagagcgagatttcgttttaaaaataaataaataagtaaataaaggtgaacgtggcgaagtagtggtttatatttgtaattttagtattttgggaggtttaggtaggcggatagtttgagtttaggagtttgagattagtttggataatatggcgaaattttatttttataaaaaattagtcgggtgtggtggtgtatatttgtagttttagttattttgggggtaggagggttatttgagtttagagttatgattgcgttattgtattttagtttcggcgatatagtgagattttgtttttaaaaaaaaaaaaaaaaaaaaaaaaaaaggtgttaagaaaattgagtttagtttgagtaatacggtggcgtttgtgggatatacgggtcgtttagtcgttttattgatttttcgatagttatagtagcgttttagattttgagagaggaattaatattttaggtttgttttagttggttgggtatcggaagtttattgtgtgtatagtttagaatttttagtggatttattattttcgttgttttgcggttgtttagtttttgagttttttttgggttttagagttttttttttcgttgtttagagaggggtataaatagaggtttcgaggatatttaggttttatatggttggcgtaggggttttagtagatgttggaattttataaaggtcgtttgggatgtaaagatttataaagtttaggattgatttttagttcgcgaaaattttttttattataggtttaagtatttgttaattatcgtcgtaattaggtatattgagtgtcgtttattttttattttttggttggatatcgcgggggcggtgcggatgggagagttatagttcggatttgggttcgttttttacggtagtagtgatttttatatttttaaataggtagaaagaaaagatacgaaagtatagtgttttgtaataggtggaagtgataggaaagggtagggtcgtgggatatcgttaggttgtgcgtttacggtagttttgggtgtttttgcggaggttttataaggcgggtagattttttgttttcgagtttatttttattggggtggaaagggggagggaggtatggcggttttttgtttgtatttttttttttagaattttattgtgggtttcgtagtagtagttagtcgtgttgtttttcgagaagtacggggagtcgggttgggtataggcgattttttttagtttttttttgttttattttaggaatttattgtttattagaaatagtttatggtattgattttattttaattaattgtttttttgagatataatttcgttttttttttttaggtttgtttagtttggaatgtaatgatgcgatttcggtttatcgtaattttcgttttttaggtttaagcgattttttttgttttagtttttttagtagttggattataggcgcgcgttattacgtttggttaatttttgtatttgtagtagagacggagtttcgttatattggttaggttggttttgaatttttgattttagatgaagtagttgggattattggtatgtgttattatatttggttagtttttttatttttagtagagagagggttttattatgttggttacgttggttttaaatttttgattttgtgattaaatcgtttcggttttttaaagtgttgggattataggcgtgagttattacgttcggttttagtttttttttttttcgagacggagttttatttttgttatttaggttggagtgtaatggtatggttttggtttatcgtaatttttgtttttcgggtttaagtgatttttttgttttagtttttagagtagttgggattataggcgtgcgttattatatttagttaattttgtatttttagtagagatagggttttattatgttggttaggttaatttttaatttcgggtgatttattcgttttggttttttaaagtgttgggattataggtatgatcgaatatgtttagttttttttttaatttattgatgttttttggaatttttttatttttaataagattatattttttgtcggtgagagcgggataaggtatggattttagggttgtttttttgggaaggaagggaagagacgggatttacgtcggttttatttgttttaatttattttttttggtgatcgtttacgttttttatattaattggaggatcggacgtttgaggtttgtttggaaggttttagatattcgttgcgagatataatttgagcggagtttattaaattttttatatataaaggaggttttttttttgtagcgttggtagtaaggttggttaaggttttgggttttagggttgggtagtggatattttttttttttgatagtattttgtatatggtagtttttagttagaatatattagtttttagaataggaggattttttggtagtatttagggggttggaggaaatgtagtggtttttgaattatagttgtaagcggggtagtttttgatggtagatagtgattaggaagggatagggtttattttttattttagggggtttcgtaagggtaaagtcgttatatatttagggttaggatgaaattggacgttgaatattagtgagggtgtattatttattttaaggtagtggggttaagttgtgggtagttgcgacgtatagtttagtttaggttttgttaatttttttgtttttttgttttcgtgttttttttcgtttttttaggtattgggttagattaggtttttgtaatttttttgtttgtttttattaagatttttaggttttgttttatcgtttaggtgtttatttgagtttttaggattttttttattgattgtttaggaaagtagggggtttatttttatagttaggtttttattttttagcgtttgtttttttattgattttgtatatatatttgttaaaatttaagttagatttatttatttatttatttatttatttatttatttatttatttttgagatagagtttcgttgtgtcgtttaggttggagcgtaatggtgcgatttcgggttatcgtaagtttcgttttttaggttttagtaatgttttgttttagtttttcgagtagttgggattataggtatacgttattatattcggttaatttttgtatttttagtagagatggggttttattatgttggttaggttggtttcgaatttttgattttaggcgatttatttattttagttttttaaagtgttgggattataggcgtgagttatcgcgttcggtttttaagcgtgggttttttattgttgggagagagattgttattggtttttttagagggtatttgttatttttagtataggttttgtttagtttttgattaatttattttatagagattaggtataggttttgtttagtttttgattaatttattttatagagattaggtataggtaattgttttattgatttaaggtattggttatattttttattcgggtttagattgggtattgagatattagaaaggtttcgtggaaatatattttttttagtcgtttttatttaattttgattgttttagttttagagtataaattttagagtttgtgtttttggttttcgtatgttatagtttgtatgttgattaagaagcgtgttggtcgggcgcggtggtttacgtttttaattttagtattttgggaggttgaggtaggtggattacgaggttagaagtttaagattaatttggttaagatggtgaaatttcgtttttattaaaaaaaaaaaaaaaaaattagttgggtattgtggtaggtatttgtaattttagttattcgggaggttgaggtacgagaattatttgaatttagggggcggagattgtagtgagttaagattattttattgtattttagtttgagtaataagagtgaaatttcgttttaaaaaaaaaaaaaaaaaaaaaaaaaaaggtcgtacgcgttgatttacgtttgtagtattagtattttgggaggtcgaggcgggcggattacgaggttaggagattgagattattttggttaatacggtgaaatttcgtttttattgaaaaatataaaaaattggtcgggcgtggtggcgggtgtttgtagttttagttattcgggaggttgaggtaggagaatggtatgaattcgggaggcggagtttgtagtgagtttagttcgcgttattgtattttagtttggggaatagagcgagatttcgttttaaaaaaaaaaaaaaaaaaatgtacgtgagttttagggtttttgagtaggagagaggtgagagtagatacggtaggagttttagggtttttgagtaggaggaaggtgagagtagatatcgtagtagttttttttcggatttttttttaaggttatggtgttttgcgtagggtgtttttgttagtttttcgaggtttagtttagtagataaggtttttttttggaaataggaggtaaagttttgaaagttaagaaggttgggaaaggagtagggtttgggtagggttcgttaggcggcggtaggtgtagcgtgtttggttgcgataaggtagggatattttcggttatttttattagttgggagaggtttaggtcggttagtgttgttttaggtaggagttttttcgcgtatagatgtagaggcgttcgggatgtttagcggtagtttcgtgtttgaagaagttagttggaaaagtaaggtttttcggatgtaattcgggagggaggtatagtttttttcgggtagggtttttagtttcgggggttagggatgtttttagcgttatatttttggtaaatgaggaaaggttacgttttttttttgttgattgataagtcggtgtaaatagttatttttggtagtttagggtttttttttgataggataaataaattatatttcgtttggtttcggtaacggttatatattgcgtagaaaacgtgttggcggtcgtatataaattttcggggtttaaataaatataggttgattttattgggcgtttttgttttttggatagttgggggagttaaggggttagttttaggggattgggggtcgttttttttttaggagggtttcgttattagggtattttaattggagtttaagagtttatgtaaacgtacgtttcgttgcgataattggttttgtttgagtgaaagttcgtaacgtaggtttttaattacgttttttttggtacggaggatataggcgttagacgggtttagtttagggtgttaagaggaagtaagggagggagggaggagagaaggaaggaagatagaattattagtatcgtgattggttcggttcggtttcgattttagtaagttatatttatttttttacgttggttttttcgttggggatttttcgtaattttttttttttgaggattttgacggtttttttgtatagcgttttcgagtttagtattttttttattttgtcgtaagagtttttttttagtaggttttttattaggtatttgtcgatgagtttggttcgtttgcggcgcggttggtagatgatttcggtggagtcgatgcggtggatgaacgtgtttatatttatcgatattagttcgtttttcgtgaatatgtttagttgttgcgggtttattatttttatgttggatttagggttttggagtttcgtcgttagttttgagttcgcgggtgagcggtttttttttgtgtttcgattttttttttttaaaattttataaagaaaaaagaaaaaaaaaaggtaataaaaattttaaaaggaagggaaaaattttttttttaatagaaacgattgttttatacgttagtttcggttgcgagtttaagttcggtgtagggtttgcggatcggcgggtatcgggggttcgggacggcggtttagacgcgagttttagtgggattcgggttttagaattgggagacggttcggttagggttaatttcgttttcggggattttggggaggtcggtcggggttttttagtgttaggttatttttcggggattttaggtttacggataagtatgaatacggtcgagcgtagtttttttcgggtcgtttattttataggtcgggttcgcgacgtcgttatttttcgggatttttatatttggagagtttaatttcgttgggggcgttttcggcgacgtttcggttttatcgtttgttttaggagtaaacgtttcgtcgcggacgatcgagcggatttttcggggggcgtcgattttcgtcggttcgggcgagcgttcggggggttgggggcgttcgggaggtttttcgtcgcggttaatagtttcgtttagggttggtcgttgttcggcgttcgcgagggttcgtattgggcgtttttcgagtcggttcgcgatttttaaggtggtcgtcggggttcggtaggcgttttttttttcgtaaacgtttgttcgagcgcgcgtttcgtttcgagtgtttttagcgttcggttcgcggggcggcgcggcggcgggggttttacggggttttcggcggtcgaggcggcgtaggtcgtaggtttcgggtcggggggttttcgaaggtgtcgggtttcgggcggcgcgtttttttcgtcgcggtcgtcgcgcgtgtggaggaggcggagcggcgaggggggtttagtttatttaaggtcgcggtagtaagtgtcgttattcgcgtttttttcgtcgtttcgcgttttattcgcgggcgtttcgggtcgtttttttttttcgcgttcgatacgtcgtcgttattttgtttatttttttttttttttttgcgtcgtcgcggatatcgtacgttcggtcgtagggtacgttttttcgcgaggacgacgtgtttattcgttggttgaatttgttattttcggttttttgttcgtttcgtcgtcgttgacgattggagcgtttggattcggtcgggcgttcgagcggcgattggtcggcgtttggtttcgttcgaggggtggatatagcgcgtttattggttttcggagacgttcgttacgggtagggggcgggaagtaggtatggggagacgaggttacggttgtgatttcggtggggttcgggaagggggtcgtaggttacgggtgttaacggtttttttgaacggtcgtagggtgggttgagttcggtgggcgggaatttgggtttgcggatttggaaggagcggggttatttttattagagtttttttttcgtatttttttttggggcgaggttaagggttaaaaagtaatataaagtggttaattttagttaaaaattttttttttgagttatttttggattaggggaaagagaaacgtttagggcggtttttgttttatcggaatttatgggggaagttttaggatagcgttgggataagtttagcgggggtttttcgtgaaaaataagagttgttaaaatatggtttgataaggttgaaaatattgaatttttttgtgttagtttcgtgttttttatttttttttgtattagcgttaggttgtttagttggaataaattattttggtataattttcgttttttggttttaagcgatttttttgttttagtttttttagtagttgagattataggcgtgcgttattacgttcggttaatttttgtatttttagtagaaattataggtgtatgtttgtaattttagttatttagaaggttgagggaggagaatcgtttgaattcgggaggaggaggttgcggtgagtcgagatcgtgttattgtattttagtttgggtaataagagcgaaattttgttttaaaaaaaaaaaaaagattttttttagaaaattgaagttgaaggaatattttttaatttaaatttattttggtattttttttttgtattgattgttggtttatattttaattttttggaatttggagataatgttggataattggtatcggtaggttttacgtttttttagagaattgtaggatatatggaagtgatttaggaaatatttggtgattattatagatagaatttttgaagatggatttttcgtttaaagattattttttttaagaattttttttagttatttttttaagtgtttggacggagatgtgttgtgagtgtgaattatatacggaatttttttgtttttttgatacgtataattttattataaaatgttaaaaaatgtagtattttaaaaaacgtaagatgtattgttgatattaatttttataagtgtgttgtgttgttatatataataaattttttaaaaattattaaatatttagggatattaggtagggtgcggtggtttatatttgtaattttagtattttgggaggtcgaagtaggcggattacgaggttaggagtttgaaagtagtttggttaatatggtgaaattttatttttattaaaaatataaaaattagttgagcgtggtggtatgtgtttgtaattttagttatttaggaggttgaggtaggagaattgtttgaattaggattcgggaggcggaggttgcggtgagtcgagattacgttattgtattttagtttaggtaataagagcgaaattttgttttaaaaaaaagaaaagaaaagaaaagtattttttgtatagagaattttatgagttatacgaaaatttgtatagttttatattgaagttaatattgagttgtattagaatttatatttttagtaaaataagtttattgtataggtattattaaaggatagttatttattttttatttttattttttttttttttatttttattttttttttttttttttttttttttattttttggtttgtttttttttgagttttttttttttgttttatttttgtttttagtacgatatgtagtaatattttttttatattttttttgtagtttaattgttttttgtttatatggttgtttatttttggttgattgtttagattatattttatttagtttttttgtagtttttacgataaataggtttgggtgtttatttttgatttttgggcgatgtttagagtaaaataggaagaaggtagatggtggttttttaggagtattgcgattttttttttttttttttttatttttttttatatttcggaggaatgtaatttttaatttttttgttatagcgagttttgttattttttgttttttttttaaattttattttttttttgtagacgtggttttttatttttttaaatattttttggagaattttacgaaattgatagaagagttcgggtgtttttttttgtgttttttttggtaggtttgcgcgaagagggtatacgaggatattttgtttttcggtttgttggggtgttttttatttatggggatagaatagtatttatttggtgcgagtttttttttagagttttatagagtattcggatttaatagagatatttttttttatattgattttttttttttttttttgagacggagtttcgttttgttgttcgggttggagtgtaatggtatgattttggtttattgtaatttttgttttttagatttaagtaatttttttgttttagtttttggagtagttgggattataggtatatattattatggttggataatttttggatttttaatagagatagggttttattatattgtttaggttggtttcgaatttttaattttaggtgatttatttgtttcggttttttaaagttttgggattataggtatgaggtattatgtttgttttatatattgaatttttaaagttagaaaaattaaaaatgggtttgttaggtacggtagtttatatttgtaattttagtattttgggaggtcgaggcggatggattattcgaggttaggagtttgagattagtttggttaacgtggtaaaattttgtttttattaaaaatataaaaattagttaggcgtggtggcgggcgttcgtaattttagttatttgggaggttgaggtaggaggatcgtttgaatttaggaggtagaggttgtagggagttgagattttgttattgtattttattttgggtaataatgagatttcgtttcgaaagaaaaaaaaatgggtttggtatggcggtttttgtttgtaattttagtattttggggggttaaggtaggtgattatttgaggttaagagtttaagattagtttgggtaatatggtaaaattttcgtttttattaaaaatataaaaattagttaggtgtcgtggcgttcgtttgtaattttagttatttaggaggttgaggtaagagaatcgtttgaatttgggaggtagaggttgtagtgagttaagattgtgttattgtattgtagtttgggtaatatagtgagattcggttttaaaaaaaaaaaaaaagggtataaataaaatattttattggttagatatagtggtttacgtttgtaattttagtattttaggaggttaaggtgggttgattacgaggttaggagttcgagattattttggttaacgtggtgaaatttggtttttattaaaaatataaaaattagttgggcgtggtggcgggtatttgtaattttagttattcgggaggttgagataggagaaaggcgtgaatttaggaggcggagtttgtagtgaattaagatcgcgttatcgtattttagtttgggagatagagcgagatttcgttttaaaaaaataaataaataaaaataaaataaaatattttattaataattttaataatgattgtatgttgaaatgatgtaattttggatatgttaggttaaagtaaatgtattattaaaattaattattttagggttatgtatagtggtttatatttgtaattttagaattttgggaggattttttgagtttaggagtttgaggttagtttgggtaatatagtaagaatttgttttaaaaaaaaataaatatataaataataggttaggtgtagtggtttacgtttgtaattttagtattttgggagg

SEQ ID NO: 193 - DNA, 1157 bp, Artificial Sequence
  chemically treated genomic DNA (Homo sapiens)
ggattttgttttttttgaaggttttagggaagagtgttttttgtttttttcgaaggttttagggaagggtttgtttttttaggtttttggtggtttgtaggtgtagttttttaatttttttttttaagcggtttgttgtttataaggatacgagttatattggatgaggggtttattaattgatggtttttgtaaagtttttatttttaaataaggttatattgtgaggtattgggagttaggattttaatatagtttttttggtggatataatttaatttttaataacgtttatataattttaagtagggtttggtattttgtgtgttttttggagagcggttgagttaggttttggtagtgtttaggttatcggtgattgtagtttttggacggtatcgtttattataggttttggaggttgtttttacggttttttgatagggtttttgttggtttgggggtttttgattaggggagcggttttaggaggggagagattcgcgtttcgggtttagcgtagtcgtttcgagtaggatcgggatttttattaagcgggcgtcgttttacgattttcgcgcgtttttaggattattcgggtacgtggtaggtcgtttgtacgttcgcggattatttttgtgataggaaaaggtacgggttatttggtaaattaaggtatagagttttaggcggaagttgggaaggcgtcgttcggtttgtatcggtcgaagggttattcgggttaggcgtatagggtagcggcgttgtcggaggattagggtcggcgtgtcggcgtttagcgaggatgcgtagattgttttaggttcggcgtcgtcgtattgggtatgcgtcgattcggtcgggcgggaatatttcgtttcgttcgggtttcgttttagtttcgttttcgcgcgtttcggtttcgttttcgcgcgtttttttgttttttttaggttttcggtttcgtttcgttttagatttcgttttacgtcgttattttcgtgtttttcggtttcgttttcgcgtttcggatatgttgggatagttcgcgtttttagaacgttttgcgtttcgacgttcgtaggttttcgcggtgcgtatcgtttgcgatttggtgagtgtttgggtcgtttcgttttcggaagagtgcggagttt

SEQ ID NO: 194 - DNA, 1157 bp, Artificial Sequence
  chemically treated genomic DNA (Homo sapiens)
gagtttcgtattttttcgggagcgaggcgatttagatatttattaagtcgtaaacggtgcgtatcgcgaggatttgcgggcgtcgggacgtaaagcgttttaggggcgcgggttgttttagtatattcggggcgcgggggcggggtcgaggggtacggggatggcggcgtggggcggggtttagagcggggcggagtcgaggatttgagaaaagtaagagagcgcgcgggggcggggtcggggcgcgcgggggcggagttggggcggagttcgggcggggcggggtgttttcgttcgatcgggtcggcgtatgtttagtgcggcggcgtcgggtttgaggtagtttgcgtattttcgttggacgtcggtacgtcggttttggtttttcggtagcgtcgttgttttgtgcgtttgattcggatggtttttcggtcggtataagtcgggcggcgtttttttagttttcgtttgaggttttgtgttttagtttgttaaatggttcgtatttttttttgttatagggatagttcgcgggcgtgtaagcgatttgttacgtgttcgagtggttttgaaagcgcgcgggggtcgtaggacggcgttcgtttagtgagaatttcggttttgttcggggcggttacgttgagttcggagcgcgagtttttttttttttggggtcgtttttttagttagggatttttagattagtagagattttgttagggggtcgtgggggtagtttttagggtttgtggtgggcgatgtcgtttaggggttgtagttatcgatggtttagatattgttagagtttgatttagtcgttttttagagagtatatagggtgttaggttttgtttggggttgtgtggacgttattaggagttgaattgtgtttattagagaagttatgttggagttttaatttttagtattttataatgtgattttatttggagatggggattttatagaagttattaattagtgggttttttatttagtatgattcgtgtttttataggtagtaggtcgtttggggaggaggattggagggttgtatttgtaagttattagaagtttaagaggatagatttttttttggagttttcggagggagtagaggatatttttttttggagtttttagagggagtaggattt

SEQ ID NO: 195 - DNA, 8093 bp, Artificial Sequence
  chemically treated genomic DNA (Homo sapiens)
ttatggaaggaaatgagattagttagcgagttgatatagaataaggtagtttaaaataaatttttttaaaaatacgaagaatagatattgaagggaagaggtgtttgtaaagattaagaaagtatatttggagatggtatttttttaaagttaaagttattaagtgtttaagtgttttaaggagggtaagattattaataaggatttagtatagtagagtaatttgagtggtaatacgggatattgggaatataaatttgttaagaaaattagtaggaatgagttataggatagtaattggtaaggatttaataattttttttttaatgtacgtattttaattatatttattgttataataggattagtaataattatatttatttaaaaaaaaaaagattgttatgtagttatagaattatttaatatagaaaatagtaaaatatatttttttttttttttttttttttttttttttttataaataagattagtttatagtaaattttttatagttaagggttaatttaaaatttttggtttatattttttttttatttaatgattatatgatgtaaattaattttattaatattttaagtaaaatatattggaattttataaaatgtataagattttaatatttaaggaattggggttagaaagtagaagtggtttttaggttttttagttttttttttaagtaataaagttttgttgtgaatatttaaagttattgggaaattatcggtagatttttttgtttttttttttcggttttttattatgttgtttttttagatatgtaagtttattttattaattaaaattttagtttgattatttttgataagtatttaatcgatatgtaattttttttttgttttaaatatgtataataggatagagtttttaaatttgatttaattattaatttttgatttataagtgttatggtgagttaatagaatttattaatgtttttattgtattttattagttaaatttagaaggttggaattagttttttttatttagtattttgttagtttgtttagtttgtatttttaattttgtttttaatggtaatttgttttattttttgaaataaaataatttatattttgggagggttaattttttattgtgttaggttgttttatgtattgtaggggtgagtgtttttaggtttaaatgttaatagaagtttttagtaaatatgataattaaaaaagtgtttttatatattttttagtattttttggaatgataggttattgtttttagttgaaagttattggtataattttggtttttaagtttttatgttatttattttaattgtttagatattaattttatttaaatttttagttatagtttggttttttgaatttgttggattagtaattatagattaaggtgttttaatagttaagataggattttggaataagagtttttaaattgtataatatttgagaggatttatgaatataaattgggttttgtttataattagttttatataatgaattttaagattgtttttttatggtgaatagaagtttggaaattattgttttggtataaagtagattattttagtagaaatatagaattattgtaatttgtgaataagattgtttttaaatatttttatttgtgtgttattttatatatagaatgtgtacgatagttttaaattttagaataaatttatttttagtatttaataaaatttgatattgtattattttaaaataaagtgtttattttaggtaggattttttaaaataaagtagtaatatttacgtagataagataaaaaagttaaaatattttatattttttaattttggagtgtaattttttttttttatcgtttttgatagggttaaatttgtgtttatagtaaaaaaaaaaaaaaaaagaattattaattggtaattattaagattttatatttattatagttttttaataggtaagttgataaaatagtttttagttattaaaaaaaaaatttaaggaaaatttttaataattagttttatttttaaattgtatgaagttttttatatttgaaatttaaaaatgattttaatgattttttttattagtaatgtgttattattgaggtgggtgatggggagggaagagggaagaaatttgttagtattattttcgaatttagaaatgtttaaaaaaaagttttaaatattttgatggttagataaaatatttttattgttatgtatgggttttttttttggaaatttatgaatttgttatgtgagtttttgtaaattggtttaaaagtatatttaaggagttgataatttaagattatatgaattagaattttaatattttattaaaataagagttgaaatttttggtatttatttttagaatatttaaaaaatagattgtaaatttaatttatattaatattaaatttttttaaaattaattatattataaaagataatgattttgttattaaattaagttttaaaaaaggtggtatttttatgttttagttttatgttgttatttgagatgaaaaaaaaggtaattgttagaattttaattgtgattagtttggacggttggtatttggtatttttttataatttaaattagtaaatttgaaaatttaaattaatttttgtttttagaattaaatttttgttgagttttttaattttgtattataaagttttatggattagatttattttttttttttataaggttattttaatcgggttttattttagttgtggtaattcgaaatagggtttggagatgtttatttgttaatggttgatttaaagtgtgttggtttcgagttaaatatgaaaaagtttttttatagatttggttattattaaataaggatgttattttataggtaatttttttgataattgggtaggatttagtagataatttagtataaaattgttttaagtttttgattttgtatttattttaaagattagtgtttgtttgaagttttgttagttttatttttattgaaataggtgtatatttaggtttaaagttaaatggatttgaaaaaagttttaagttttttttaatgaatttgaggtttttaaaatgttttttaaattttttttggagacgatagattattatttgatatttattaggattaaatatttttttattttttttattttgttgttttagtttattaataatttttttgagggtaggaaagtttgttagatttttttttttaatatgtttttgaaataaatttagtttaatttcgaaagtataaatatggttaaaggtagtagtagtaaagattttattaattcgtaattttttattgagttttcgaaggtgttttataatgtttattaagaagttaaagttataaagttattgtttgtttgagaagtggattgttgttgtttttattgaaattaagaacgtttttatttttttttttagagagaatattagttttaaagtttttttttttttaagttaattgtttagatatcgtttattaatttttttattatgttttgatttagatttcgttagtaaagtttgaaatttaggtcgtttaacgtttttggttttaattaaaattatttattcggatatggtatttatgatttgattaatatttatattataggagtttaatagttttaagtgaagaaattttgaataatgaatgatattttaatagttggggtttacggtttttttttttatgtatgagacgagttttgagtttttattaattatttttaaagtatgggtcgtggttagtttaattattttttgtaagttaagttttgttgtttgtagggattttaggattgtcgatatgagcgtattaatattgaaatgatgagttaggttgattatggttagaagatttttttgtatttttaatttagggtttatatcgcggataaagattaggaggtagtttttataggttataaaagtttggtcgtttaaggtaagagaataggttttaaagtttttggttcggttaaaaagttggttgcgtagatttttgttaatgtttaggattttttgttttgtgatatttggagataagttaacgttttgtaggacgtttatatgttcgggtagtattttttttagtaatatttttatgtattggtatataaagttttttttattttagtcgcgattttttaaggttaagaggcggtagagttcgaggtttgtacgagtagttttttttttaggagtgaaggaggttacgggtaagtcgttttgacgtagacgttttattagggtcgcgcgttcgtcgttcgttatatatcgttcgtagtattcgtgtttagtttcgtagtggcgtttgacgtcgcgttcgcgggtagttacgatgaggcggcgatagattaggtatagggttttatcgtttttcggaggttttattattaaataacgttgggtttattcgggtcggaaaattagagtttcgtcgatttttattttgttttttttgggcgttatttatattttgcgggaggttataagagtagggttaacgttagaaaggtcgtaaggggagaggaggagtttgagaagcgttaagtatttttttcgttttgcgttagattattttagtagaggtatataagttcggtttcggtatttttgtttttattggttggatatttcgtatttttcgagtttttaaaaacgaattaataggaagagcggatagcgatttttaacgcgtaagcgtatatttttttaggtagcgggtagtagtcgttttagggagggacgaagagatttagtaatttatagagttgagaaatttgattggtatttaagttgtttaattaatagttgtcgttgaagggtggggttggatggcgtaagttatagttgaaggaagaacgtgagtacgaggtattgaggtgattggttgaaggtattttcgttgagtatttagacgtttttttggtttttttggcgttaaaatgtcgttcgtggtaggggttattcggcggttggacgagatagtggtgaatcgtatcgcggcgggggaagttatttagcggttagttaatgttattaaagagatgattgagaattggtacggagggagtcgagtcgggtttatttaagggttacgatttaacgggtcgcgttatttaatggcgcggatacgtttttttgttcgggtagaggtatgtatagcgtatgtttataacggcggaggtcgtcgggttttttgacgtgttagttaggtttttttttttttcgtagatcgtgtgtttttttatcgttttttttcgagattttttaagggttgtttggagtgtaagtggaggaatatacgtagtgttgttttaatggtatcgttaattaagtaaggaagttatttaatttaaaattatgtatgtagaatatgcgaagttaaaagatgtataaaagtttaagatggggagaaaaatttttttttagagggtattgtgttattgtttttttgttttttatttattttagaaattatttgtttatatttaaaggtataatttattttgagttttttttaaaataaatcgtttgtagttttaggataggttgatgtattttgggtttgatttttgattattttattgttaaattagtgattttttttagtgtttttttgttttttatttcggaggacgtatttcgaagatattagattttatgggttatttttggattttgaagtttataattgtgataaaaaatgtgaagggaagagatttgaaatatgtggaaggaaaagtgagtgtagattataaatttttaaaaagataagtttaaaatatatttaaacgttatgttagattattttgttaaaattagttgttagtgacgttcgtacgttaatagaaaaaagaatgttttagtttggagtggtaggtttttagagggatttattgtgaaagtataaattatttagggtaatgggattgagagaatagtgggtagaaaggattattgaaggaaaggaagagaattggaaggtagatgaaagaaggagtaagaatttggggatgtttttttttttttatttgtaatagtagtaatagaagtaatggtagattggtttttgtttttattgtgttagaatgaattgataggataattgggtttattattgtattgtgttagaatattgtaaaataaaattaaatatattagtttggtggtttgtaattaattatttaagtggagatttttattttttttttattttttttttagacggagttttattttgttatttaggttggagtgtagtggcgcgattttagttgattgtaattttttttttataggtttaagggagatttttttgttttagtttttcgagtagttaggattataggtatgtgttattatatttggttaattttgtatttttagtagagatgggatttttttatgttggttaggttggtgttaaaattttcgattttaggtgaatcgtttgttttagttttttaaagtgttgggattataggcgtgagttatcgcgttttgtagttttttgtatttttaatagagatagggttttattatgttagttaggatggtttcgattttttgattttaggtgatttgttcgttttggttttttaaagtgttgggattataagtatgagttatcgcgttcggtttaagtggagatttttatatggagtttagttatattttttttaatatataagttgagatgattaatataattttaatataggggtttatgagaaatgtttgtaatatttaagtaatttattgtttttttttttttttttttaagatgaagttttattttgttgtttaggcggaagtgtagtggcgtgattttggtttagggtaatttttgttttttggttttaagcgatttttttgttttagtttttcgagtagttgggagtataggcgtgtatgattatattcggttaatttttttatttttagtagagacggggtttttttatgttggtcgggttggttttgaatttttgattttaggtgattcgtttattttagtttttttaagtgttgggattataggtgtgagttttcgtgtttagtttattattttatttttgaataaagaattgtttgtgtggggaatagataatttttttttatgtagtttttgttagaaaatttgttttttttagtagttggtttgtgtttataggttattttttgaaagtataaaaaatttattgattttttttttttgggtttttttttttttttgagatagagttttgtttttgttgtttaggttggagtgtaatggcgcgattttagtttatcgtaatttttattttttgggtttaagtgatttttttgttttagttttttgagtagttgggattataggtatgcgttattatgtttggttaattttgtatttttagtataaatggggtttttttatgttggttaggttggttttaaatttttgattttaggtgatttattcgttttggttttttaaagtgttgggattatgggtgtgagttattgcgtttggttagaaaatttattgattttttaaagatttattaattttttgtattattttttttttttttttttatcgtaaatataaaagggaatagtagagaaaattatttagaattttattttttagtgatattatttagtgatattttattagagttatttaggaatttgaggttgaataaagtttaggtaaaagtaaaattagttgagaagagatatttgttaaaagaaatttatttttaattttatttgttgttttttttagaggaatagaaatagtgttgaatgttttattagaaatgatggttgttttgttcgtttttttttttttttttatataatatgtaaatttatatagtgtatgagtttgtaagataaaggaaaaatacgttaatgaggtattattgtttgtatttggagtttgttattattgtttggtttatattaaaatatgtatattagagtagttgtagattgataaattattttttgtttgatttgttagt

SEQ ID NO: 196 - DNA, 8093 bp, Artificial Sequence
  chemically treated genomic DNA (Homo sapiens)
attggtaaattaaatagaaaataatttattagtttgtaattattttaatgtatatattttaatatgagttaagtaatgataataaattttaaatataaataatagtgttttattaacgtgttttttttttgttttataggtttatatattgtatgagtttatatattgtgtgagagagagggaagagacgggtagagtaattattatttttaataggatatttagtattatttttgtttttttaggaaagatagtaagtgaagttaaaaatagattttttttggtagatgtttttttttaattaattttatttttatttgaattttatttagttttaggtttttaagtgattttaataaaatgttattaaataatgttattaaaaaataaaattttgaatgattttttttattatttttttttatatttacgatggaggggaaaaaaaaaagtaatgtagaaagttaataaatttttaggaagttaatgaattttttggttaggcgtaatggtttatatttataattttagtattttgggaggttaaggcgggtggattatttgaggttaggagtttgagattagtttgattaatatggagaaattttatttgtattaaaaatataaaattagttaggtatggtgacgtatgtttgtaattttagttatttaggaggttaaggtaggagaattatttgaatttaggaggtggaggttgcggtgagttgagatcgcgttattgtattttaatttgggtaataagggtaaaattttgttttaaaaaaaaaaaaaaatttaaaaaaaagaagttaataaattttttgtgtttttaaagagtagtttataagtatagattaattgttagagaaaataaattttttagtaggggttgtatgagaaagagttatttattttttatatagataattttttatttagaaataagataataggttgggtacgggggtttatatttgtaattttaatatttggggaggttgaggtgggcggattatttgaggttaggagtttaagattagttcggttaatatggagaaatttcgtttttattaaaaataaaaaaattagtcgggtgtggttatgtacgtttgtatttttagttattcgggaggttgaggtaggaagatcgtttgaaattaggaggtagaggttgttttgagttaagattacgttattgtattttcgtttgggtaatagagtaagattttattttaaaaaaaaaagaaagaagataataagttatttaaatattatagatattttttatgagtttttgtattgaagttgtattagttattttaatttatatattaaaaagagtataattggattttatataaaaatttttatttgagtcgggcgcggtggtttatgtttgtaattttagtattttgggaggttaaagcgggtagattatttgaggttaggaaatcgagattattttggttaatatggtgaaattttgtttttattaaaaatataaaaaattgtagggcgcggtggtttacgtttgtaattttagtattttggaaggttgaggtaggcggtttatttgagatcgagagttttgatattagtttgattaatatggagaaattttatttttattaaaaatataaaattagttaggtgtggtggtatatgtttatagttttagttattcgggaggttgaggtaggagaattttttttgaatttgtgaggaggaggttgtagttagttgagatcgcgttattgtattttagtttgggtgataaagtgagatttcgtttaaaaaaaaaataaaaaaaaaataaaaatttttatttaagtaattaattataagttattaagttagtatgtttagttttgttttatagtattttggtatagtataataataggtttagttgttttgttaatttattttaatatagtagaaataaaagttagtttgttattgtttttgttattattattataagtgaaaaggaaaaaatatttttaggtttttgtttttttttttatttattttttaatttttttttttttttttagtggttttttttatttattgtttttttagttttattgttttgaatagtttatatttttataataaatttttttagaaatttattattttaaattgaagtatttttttttttattaacgtacggacgttattaataattgattttaataaaataatttgatataacgtttaggtgtattttgggtttgtttttttggaagtttatagtttgtatttatttttttttttatatgttttaaattttttttttttatattttttgttatagttataagttttaaaatttaaggatgatttataaaatttggtattttcgaagtgcgtttttcgaaataaaggataggaaaatattaagaggggttattaatttaataatagggtaattagaagttaagtttaaagtgtattagtttgttttaaaattataaacgatttgttttgaaagaaatttaaaatgaattgtgtttttggatgtgaatagatgatttttggaatgaatgaaaagtaagaaaatagtaatatagtattttttgaaaaaaggtttttttttttattttaagtttttatatattttttaatttcgtatgttttgtatatataattttaaattaagtggtttttttatttagttaacggtattattaagataatattacgtatatttttttatttatattttaaataatttttaaaaggtttcgggggagagcggtaaagaaatatacggtttgcggaaaaggagaaggtttgattggtacgttagggaattcggcggttttcgtcgttgtgggtatgcgttgtatatgtttttgttcgggtaaagaggcgtgttcgcgttattgagtgacgcggttcgttaagtcgtagtttttaagtgagttcggttcgatttttttcgtattagtttttaattatttttttgatagtattagttggtcgttggataatttttttcgtcgcgatgcggtttattattgtttcgtttagtcgtcgaataatttttgttacgaacgatattttggcgttagaagagttaaggaaacgtttagatgtttaacggaagtgtttttagttaattattttagtgtttcgtgtttacgttttttttttagttgtagtttacgttatttagttttattttttagcggtagttattgattggatagtttgaatgttagttaaattttttaattttgtgggttgttgggttttttcgtttttttttgaagcggttattgttcgttatttagaaggatatgcgtttgcgcgttagagatcgttgttcgttttttttattggttcgtttttaggagttcggggaatacgaaatatttagttaataggagtagagatgtcggaatcgggtttgtgtgtttttgttgaggtgatttggcgtagagcggaggaggtgtttggcgttttttaggttttttttttttttttgcggtttttttaacgttggttttgtttttgtggtttttcgtagaatgtggatgacgtttaaaagaagtaagatggaagtcgacgaggttttagtttttcggttcgagtggatttagcgttatttggtggtggagttttcggagggcgatggggttttgtgtttggtttgtcgtcgttttatcgtagttattcgcgaacgcgacgttaggcgttattacgaggttgagtacgaatattacgagcggtatgtggcggacggcgagcgcgcggttttggtggagcgtttgcgttagggcgatttgttcgtggttttttttatttttgaagagagagttgttcgtgtaggtttcgggttttgtcgttttttggttttgaagggtcgcggttggggtgagggggattttgtatattagtgtatggaggtgttgttgagagaggtattgttcgagtatgtaagcgttttgtaaggcgttgatttatttttagatattataaggtagaggattttgagtattgataggaatttacgtaattagttttttaatcgagttagggattttaaagtttatttttttgttttggacgattaggtttttgtggtttatgagaattattttttggtttttattcgcggtgtaggttttgagttggaggtgtaagaagattttttgattataattaatttgatttattattttagtgttggtgcgtttatgtcggtaattttagagtttttgtagatagtagggtttagtttgtagagaatggttggattgattacgatttatattttgaggatgattggtgagaatttaggattcgttttatatatgagagaaaaggtcgtaagttttaattgttggaatgttatttattatttaggatttttttatttggaattgttgagtttttatgatgtagatgttaattagattataaatattatattcgaatggatagttttgattaagattagaggcgttaggcgatttgaattttagattttattaacggaatttgaattagagtatggtgaaagggttaatggacgatgtttgaataattggtttaggagagggaaaattttaaaattaatattttttttaagaaaagaaatggaagcgtttttggttttagtaggggtaataatagtttattttttagataaataatggttttgtgattttggttttttggtggatattatggaatattttcgagaatttagtgaagaattacgagttagtaaagtttttgttgttgttgtttttgattatatttgtattttcgaagttaagttgaatttattttaaagatatattgaggaaaaaaatttaatagatttttttgtttttagagaagttgttgatgagttaaaatagtaaaataaggaagatgaaaaaatatttgattttgataggtattaaatggtgatttgtcgtttttaaaaagaatttgagagatattttaaggattttaggtttattaaaaaggatttagaattttttttaaatttatttaattttaaatttgaatatgtatttattttagtgagggtggagttaataaaattttaggtaaatattaatttttggaatgaatatagaattaaagatttggggtagttttatgttggattgtttgttgaattttatttaattattaaaggggttgtttgtaaggtggtatttttgtttgatagtaattaaatttgtgaaaaggtttttttatatttgattcgaaattaatatattttgagttagttattaatagatgagtatttttaagttttgtttcgggttgttataattgaaatggagttcggttgggatgattttgtgagagaaagaaatgaatttaatttataaggttttgtagtataagattgaaaaatttaataagaatttaattttaaaagtaaaaattggtttgagtttttaagtttattaatttggattgtgagaaagtattaagtattagtcgtttaaattgattataattaaaattttgatagttgtttttttttttattttaaatggtagtatgggattgaaatatgagaatgttattttttttaaaatttagtttagtgataaagttattgttttttatgatatagttaattttaaagagatttagtattaatgtgagttgaatttgtagtttgttttttaggtgttttgaagataaatgttaaaaattttagtttttattttaatggagtgttaaaattttgatttatatagttttaaattattaattttttaaatgtgtttttgaattaatttgtagaagtttatatagtaagtttataagtttttaaaaaggaagtttatatataatagtggaggtgttttgtttaattattaaaatgtttgagatttttttttaaatatttttgagttcgaaggtaatattgatagatttttttttttttttttttttattatttattttagtgataatatattattgatagaggaagttattagaattatttttaagttttagatataggagattttatgtaatttggagataagattaattattgggggttttttttggattttttttttaataattgggggttattttattagtttgtttattaaaggattatggtaagtatagaattttaatggttgttagttagtaattttttttttttttttttttattgtagatataagtttggttttattaaaaacgatgaggaaaaaagattgtattttaggattaggaggtgtgagatattttagtttttttgttttatttgcgtgggtattgttgttttattttaaaaaattttgtttaaagtaaatattttgttttaaaatgatatagtattagattttgttagatgttagaaatggatttattttaaaatttggaattgtcgtatatattttatatgtaagatagtatataagtagaaatatttaaaagtagttttatttatagattgtagtaattttgtatttttattaagataatttgttttgtgttaaaatagtaatttttaaatttttgtttattatgaaaaggtaattttaaagtttattatgtaaaattaattataaataggatttaatttatatttatagatttttttaagtattatataatttaaaaatttttgttttaaagttttgttttaattattgaaatattttaatttgtggttattaatttagtaaatttaaggaattaggttatgattaagaatttaggtggaattgatgtttgggtaattaaaataaatggtataagagtttaaaaattaaagttgtgttagtggtttttaattagaggtagtaatttgttattttagaggatgttgagaaatgtgtaggggtatttttttggttgttatatttattaggggtttttgttggtatttaagtttaaagatatttatttttgtagtgtatgggatagtttggtataatgaagaattagtttttttaaaatgtagattattttattttaagggatagggtagattattattagaagtaaaattaaaagtataagttgggtaaattgatagaatattagataggagagattaattttaattttttaaatttggttagtaaagtgtaataaaggtattgataagttttgttagtttattatagtatttgtaaattaggaattaataattgaattagatttaagggttttgttttgttatatatatttaaggtagaaaaaaagttatatgtcgattaggtatttattaagaatggttaagttgagattttggttaatagagtaagtttatatatttagagaaataatatagtggaaaatcgaaaaaaaaaaatagaaaaatttatcggtaattttttaatagttttgaatatttatagtagagttttattatttgagagaaagattggaagatttgaaagttatttttgttttttaattttagttttttaaatattgaaattttgtatattttgtgaaattttagtatgttttgtttaaggtgttaataaaattagtttgtattatgtagttattgagtgagggggagatataagttaaggattttaaattgatttttagttatagagaatttgttataagttagttttgtttgtaaaaaaaaaaaaaaaaaaagaaaaagaaaaaagtgtattttattgttttttgtattaagtaattttgtaattgtatggtagtttttttttttttaaataaatatagttgttattggttttgttgtagtagtgaatatagttaaaatacgtatattaaaaaaaaaattattaggtttttattagttattgttttatagtttatttttattagtttttttgatagatttgtatttttagtgtttcgtattgttatttaaattgttttattatgttaagtttttgttaatagttttattttttttgaaatatttgaatatttgatgattttagttttgaggagatattatttttaggtgtgtttttttagtttttgtaggtattttttttttttaatatttgtttttcgtatttttaaaaaaatttgttttagattgttttgttttgtgttagttcgttagttgattttatttttttttatgg

SEQ ID NO: 197 - DNA, 6521 bp, Artificial Sequence
  chemically treated genomic DNA (Homo sapiens)
ataaaattatgtatgggtaaaagatttaattaggtgtagtttagaaaaacggattttttttttttttttgagatagagttttgttttgttatttaagttggagtgtagtggtgtaatttcggttaattgtaattttcgtttcgtaggtttaagtgatttttttgttttagtttttcgagtggttgggattataggcgtgtgttattattatatttgattaatttttgtagttttagtagagacgggagggttttattatgttggttaggttgtttttaaatttttgattttaggtgatttatttattttagtattttaaagtgttgggattataggcgtgagttattatgtttagatttaaattttttttgttttttttttttttttgggggtggggggtagggttttattttgttgtttaggttggagtgtagaggtttgattttggtttattgaaatttttattttttaggtttaagtaatttttttattttagtttttcgagtagttgggattataggcgtgtattattatatttggttaattttttgtatttttggtaaagacggggttttgttatgttgtttaagttgtttttgaatttttgggtttaagcgatttttttgttttatttttttaacgtgttggaattgtaggtatgagttattatgtttggaataaagttttattttttaagtggattatttaaaaaaatgttttatggttaggtacgttatttttttttagtttgggtaagtgagtcgagattgtgttattgcggtttggtttgagcgatagagggagattttattttagataaataaataaataaaattaaaataaatttaaatattttttatatgataaaattatttttaatggtaattataaaatgaataataagggttaagaaataaatttagtgaatattttttttttttgaattttgtaaatataattatgttagtataaaaatagttatgtattgtttaataatagggatatgttttgagaaatgagttattaggtaattttgttattgtgtaaatattatagagtgtatttttataaatttagatggtgtagtttattatttatttaggttatatggtatagtttggtgtttttaggttttaatgtttatagtatgttattatattgaatattgtaggtagttgtaagataatggtatttgtgtatttattgtagagatagggttttttcgtttgtcgtttaggttggagtgtagtggtataattatagttttttgtagtttttaatttttgggtttaagtgatttttttattttagttttttaagtagttaggattatacgtttgtgttattaggtttgtttattgtttttgtttgttttttggtagagatggagggttttattatattgtttagattggttttgaatttttggttttaagtaatttttttgttgttttggtttttaaagtgttggtattataggaatgagttaaaagtttaatatggttgttgaataaaagattgatttaattaagtacggattttgtttttatggagttgaaggtcgttagagtagataaaatgagttattatttttatatgagttagacggtggataaagttattattgagggtaggtaaagaattgggttggtttaaagatgttagggattttttttagattagtggtagagggttggttaaggagttttttgaaggaggtggttttttatttgagttttaaagaatagaagagattagatagggaggatagtaaaatttttttttttttttgaaatagtttcgttttgtcgtttaggttggagtgtagtggcgcgattttggtttattataagttttgttttttgggtttacgttatttttttgttttagttttttgagtagttgggattataggcggtcgttattacgttcggttaatttttttttttttttttttttagtagagacggggttttattatgttagcgacgatttttgtttgtttgtttgtttttgagatagagttttattttgtcgattaggttggagtgtagtggcgcgatttcggtttattgtaatttttgttttttaggtttaagtgatttttttgttttagttttttgagtagttgagattataggtgtttgttattatgtttagttaatttttgtatttttagtagagacggggttttattatgttggttaggttggtttcgaatttttgattttaggtgatttgtatatttcggttttttaaagtgttggtattagaggtatgagttattgtatttggttagtaaaattatttgtgatatagtagtaagtgtataagtattgatttattagagttgaaggtggttgaggtatttaagtgggtttttggggattttgttatgttagggaatatttttttagataagggattaggaggtttggagggtttttaaggaagagttagggtagtaggggtattttggagttaggggttatggttatatgttaataggattagaaatattttaatgtatttaattaatttatataattatattggtgggtgtttattgaatattagttttagatatggatttgaaatggttttatttttttttagtttgtttaagttaatggagttttattagaatgtgagttataaaatagtagagttattttttatttaatgttgtatttgtagggtttagaatagtatttgaaggattggcggaggtttaataaattgttaaaagggtagattagttaggtgtgatggcgtgtgtttgtagttttagttatttgggaggttgaggtaggaggattatttgattttaggatttttgggttgtagtgtagtatattagttaggtgtttgtattaagttttgtattaatttggttgtttaaggatggttgaattgatttaggtggaaattggagtaggttaaaatttaatgttgattagtaatagggtcgtatttgtaaatagttatcgttttttagtttgggtaatatagtgagattttatttttaaaataaattttaaaaataattaattagaaaaaaaaattagtttgtaattttagtattttgggaggttaaggcgggtagattatttgaggttaggagtttaagataagtttggttaatatggtaaaattttaatttttattaaaaatataaaaattagttgggcgtggtggtaggtgtttgtagttttagttatttaggaggttgaggtaagagaatcgtttgaatttgggaggtggagattgtagtgggtcgagatcgcgttattttattttagtttgggtagtagagtgcgattttgttttaaaaaaaaaaaaaaagaaagaaaagaaaagaaaaagaaaagaaaagaaaaaaattgggaggtttaagtttatttttggtgtttttatatttttttgttttatttttttgtatttagtttttttttgtaatttgtgttttatattagtttttaagtttttaacgtgatttagtatgagaattggattttgttatttttttgtttataatattttatgttttttttttgtttagaatattattttttttattgtttttattaatggaattggtatttttttaaggatatgattaaatttgtttatttttatattattttttaaagtagaatttatttttttttttttaatatgatgatattgatagggtttgtttttatttattagattgtgagttgtttagggtaggtagcgttttttgtttttgtttttgttttttttttttgagatagggttttgttttgttatttaggttagagtgtaatggtatagttttagtttattgtagttttaatcgtttcggtttaaattattattttattttagttttttgagtagttgggattataggtatatgttattatatttggttaatttttttgtatttttagtagagatagggtttggttatgttgttcgggttggtttcgaatttttggatttaagtaatttatttattttagttttttaaaatgagggatcgtgttttatttatttttatgtttttagtttatagtttagtgttggatttatggtagtattaaataaatatttgttgaatgtaatagtaaatagtattttagggagtaagaattagattaataaaggtggtaaaaggtttggagaaaaaaataatagtttaatttggttagagtatgagggagagtagtaggagataagatggaaaggttttttgggtaaggttttgaaggaagttggaagttagaagtatataatgtgtatatcgtggtaggtagtggggagttaatgaaggtttttgagtaggagagtaatgtgttgaaaaataaatataggttaaatttattagagtttttttgatatatatatttgttttttatttaagtttaagtttgttttttatatatttattatttaatttattttcgggtttttttagtagtttgttttatttttttatttgttttttggtggagttagggatgtatatatgagttgtttttttttttagttagaggatatgggggttttagtttttttgtttttttttttttgtgtttggagttgggaagtaggttagggttagttgaggttggttggtaagtagttgggtggtgttagggagagtttgtatagtgttaggtggtgttttgggttttaagttgagtttatggtttcgataattttttgtttgtgtatatatttgttttttattttatttttattttagttttggtatgggggagagggtatagggttagataaatttgtgagattttggttttatttttgtaaaagggcgttttgtgagttagtttgtttttttttaggtttgttttttttttatttagttttcgtttttaatgtacgtatagttcgtatatatcgtgtgttgggatattttatagttagtcgtatggtttttttgtgttttagtttttggttttttttgttgatttcggtttttgttttaggttttattgtgtaattgttgttgttattgttgtttttggtgtttgtttatttttagaggttgtttcggatgtaggaggatttttttttgggaggaggtttttttggggaagatgatttattgggcgaggaggatttgtttagtgaagaggatttatttagagaggaggatttattcggagaggaggatttatttggagaggaggatttatttggagaggaggatttatttgaagttaagtttaaattagaagaagagggttttttgaagttagaggatttatttattgttgaggtttttggagatttttaagaattttagaataatgtttatagggataaagaaggtaagtggttattaatttttaaatttaggttttaggaggtttatgattttttttttatattttagtttaggttttgtttatttagggaaggaggggagattgtattttttatagaagtttttttagaggttttatattaatatttttatttttattttcggaggtagaaagggatagatgtggagagaaaataaaaagggtgtaaaaggagagaggtgagttggatgagatgggagagaagggggaggttggagaagagaaagggatgagaattgtagatgagagaaaaaatgtgtagatagaggaaaaaaataggtggagaaggagagttagagagtttgaggggaagagaaaaggaaagtttgggaggtgaagtgggtattagagataagtaagaagagttggtagaagttattttattttaggttataatgaggaaattgagatttaggaagaagggatatagtaggtagagaaacgtggttttttgatttttaagttaggaatttggggaaaggggttggagattatataaggtagagggatgagtggggagaagaaagaagggagaaaggaaagatggtgtatttatttatttgggatttaggattgaagtgtttatttattttttttttttttttttttgagataaatttttatttttgttgtttaggttggagtgtaatggcgcgatttcggtttattgtaatttttatttttcgggtttaagtgatttttttgttttagtttttagttaagtagttgcgattataggtatgcgttattacgttcggttaatttttgtatttttagtagagacggggtttcgttatgttggttaggttggtttcgaatttttgattttaggtgatttaattattttggttttttaaagtgttgggattataggcgtgagttatagcgtttggtttgaagtagttatttatttttatagattttaagataatgattgtaagttggtaggattgttgtttggtttatttagttgcggtgttgagtttgggtgcggttttttgtgttttgtatttggttcgtttaaggtatttgttattcgtaatgtttttgtaaggtatttgcgtttgtgatatcgttttggtcgttaggaagggattggggttttaagtttgagcggtttattttttttatttatatagg

SEQ ID NO: 198 - DNA, 6521 bp, Artificial Sequence
  chemically treated genomic DNA (Homo sapiens)
tttgtataaatgaaaaggatgaatcgtttaagtttagagttttaatttttttttggcgattaaaacgatgttataaacgtagatgttttataggagtattacgggtaataaatgttttaagcgggttaggtgtaaagtataggagatcgtatttaaatttaatatcgtagttgggtgggttaaatagtaattttattagtttgtaattattgttttagggtttgtaaaagtgagtggttgttttaggttaggcgttgtggtttacgtttataattttagtattttgggaggttagggtggttggattatttgagattaggagttcgagattagtttgattaatatggcgaaatttcgtttttattaaaaatataaaaattagtcgggcgtggtggcgtatgtttgtaatcgtagttatttggttagaggttgaggtaggagaattatttgaattcgggaggtggaggttgtagtgagtcgagatcgcgttattgtattttagtttgggtaataaaagtgaaagtttgttttaaaaaaaaaaaaaaaaaaagtgagtgggtattttagttttgagttttaaatgagtgagtatattattttttttttttttttttttttttttttttatttatttttttgttttgtatggtttttaatttttttttttaaatttttggtttgggagttaagaagttacgtttttttatttgttgtgttttttttttttaggttttaatttttttattgtagtttaagatgagatgatttttattagttttttttgtttgtttttggtatttattttattttttaagtttttttttttttttttttttaaattttttgattttttttttttatttattttttttttttgtttgtatatttttttttttatttgtagtttttattttttttttttttttagtttttttttttttttttattttatttagtttatttttttttttttgtattttttttattttttttttatatttgtttttttttattttcgagagtggggatggggatattggtatgggatttttggaagggtttttgtggggagtatagttttttttttttttttgagtgaatagagtttaggttggggtatgggaggggagttatgaattttttggaatttggatttggagattgatgattatttattttttttgtttttgtgggtattattttggggtttttgaggatttttaggagttttaatagtaggtagattttttaattttagggagttttttttttttgatttaggtttaattttaggtagatttttttttttaggtagatttttttttttaggtagattttttttttcgggtggatttttttttttgggtgaattttttttattgggtagatttttttcgtttagtgggttattttttttagaagagtttttttttaagggggaatttttttgtattcggggtaatttttggggatggataggtattagaagtagtagtgatagtagtagttgtatagtgaggtttggagtaggggtcgggattaatagagggagttaggggttggggtataggggagttatgcggttgattgtggggtgttttagtatacggtgtgtacgggttgtacgtgtattggaaacgagagttgggtgggggaggagtaagtttggaggggagtaggttgatttatagagcgtttttttgtagagatggagttaaagttttataggtttgtttggttttgtgtttttttttttatattaaagttaggatgggggtggagtgaggggtaggtgtgtgtataggtagaaggttatcggggttatggatttagtttggaatttaaggtattatttggtattatgtaggttttttttggtattatttagttgtttgttagttagttttagttaattttggtttgttttttagttttaggtatagaaggggaaaggtaggggagttggggtttttatgttttttggttgagagggaaagtagtttatgtatatatttttgattttattaggaagtaggtaaagaggtagggtaggttgttaggggagttcgagggtgagttaagtaatgggtatgtgggagataaatttgagtttgaatgaaaagtaagtgtatgtgttagaggggttttgataggtttaatttatatttattttttaatatattatttttttgtttaaaagtttttattggttttttattgtttgttacgatatgtatattgtgtatttttgatttttaattttttttaaaattttgtttaagagatttttttattttgttttttattatttttttttatattttagttaaattaaattattatttttttttttaaattttttattatttttgttaatttagtttttgttttttgaaatgttatttattattgtatttaataaatatttatttagtattattataggtttagtattgggttatggattagggatatggaaatgaataagatacggttttttattttgggaggttgaggtgggtggattgtttgagtttaggagttcgagattagttcgggtaatatggttaaattttgtttttattagaaatataaaaaaattagttaggtgtaatggtatgtgtttgtagttttagttatttaggaggttgaaatgggatgatggtttgagtcgaggcggttgaggttgtagtgagttgagattgtattattgtattttggtttgggtgatagagtaagattttgttttaaaaaagaaaaataaaaataaaaataaaaaacgttatttgttttgagtagtttataatttagtgagtgagggtaaattttgttaatattattatattgagggaagagagatgaattttgttttagaagataatatagaagtaggtaaatttgattatgtttttgaagaaatattagttttattggtaaaaataatagggagaatgatattttgggtaaagggaaggtataaaatattatgagtaggagagtgatagaatttagtttttatattaggttacgttgagggtttgagggttagtatggagtatagattgtaggggaagattgggtgtaaggagatggggtagaagagtgtgaggatattaagaatgggtttaggttttttagtttttttttttttttttttttttttttttttttttttttttttttttttttttgagatagagtcgtattttgttatttaggttggagtgaagtggcgcgatttcggtttattgtaatttttattttttaggtttaagcgatttttttgttttagttttttgggtagttgggattataggtatttgttattacgtttagttaatttttgtatttttggtagagattggggttttgttatgttggttaggtttgttttgaatttttgattttaggtgatttgttcgttttggttttttaaagtgttgggattataggttggtttttttttttaattaattatttttaaaatttattttagagatgggattttattgtgttgtttaggttggagggcggtggttatttataggtgcgattttgttattgattagtattgagttttgatttgttttaatttttatttgggttagtttaattatttttaggtaattaggttgatgtagaatttagtgtagatatttgattggtatattatattatagtttagaaattttgggattaagtgatttttttgttttagttttttaagtagttgggattataggtatacgttattatatttggttagtttgtttttttaataatttattaagttttcgttagttttttaggtgttgttttaggttttatagatgtagtattgaatagagaatagttttattgttttgtagtttatattttagtaaggttttattggtttaaataaattaaaagagaataaggttattttaggtttatatttagggttaatatttagtaggtatttattaatatggttgtgtaggttaattaaatatattaagatatttttaattttgttggtatatagttatggtttttagttttagggtatttttgttattttagtttttttttagggattttttagattttttgattttttatttaaagaggtattttttggtataatagagtttttaggagtttatttgagtgttttagttatttttaattttgataggttagtgtttgtgtatttgttgttgtgttataaatagttttattggttaggtgtagtggtttatgtttttaatattagtattttgggaggtcgaggtgtgtagattatttgaggttaggagttcgagattagtttggttaatatggtgaaatttcgtttttattaaaaatataaaaattagttgggtatggtggtaggtatttgtaattttagttatttaggaggttgaggtaggagaattatttgaatttgggaggtagaggttgtagtgagtcgagatcgcgttattgtattttagtttgatcgatagagtgagattttgttttaaaaataaataaatagataaaaatcgtcgttaatatagtgaaatttcgtttttattgaaaaaaaaaaaaaaaaaaaattagtcgggcgtggtggcggtcgtttgtagttttagttatttaggaggttgaggtaggagaatggcgtgaatttaggaggtaaagtttgtagtaagttaagatcgcgttattgtattttagtttgggcgataaagcgagattgttttaaaaaaaaaaaaaaattttattgttttttttgtttaattttttttgttttttgaaatttagatgaaaggttattttttttaggaaattttttaattaattttttattattagtttggaaaagatttttggtatttttgagttaatttagttttttgtttgtttttaataataattttgtttatcgtttaatttatataagggtgataatttattttatttgttttaacggtttttagttttataagggtagggttcgtatttgattgagttagttttttatttaatagttatattgagtttttggtttatttttgtaatattagtattttggaggttaaggtagtaggaggattgtttgaggttaggagtttaaaattagtttgagtaatatagtgagattttttatttttattaaaaaataaataaaaatagtagataggtttgatgatataagcgtgtagttttagttatttgggagattgaggtgggaggattatttgagtttaggagttggaggttgtagggagttatgattatgttattgtattttagtttgggcgatagacggagagattttgtttttatagtagatgtataaatattattgttttataattgtttatagtatttagtatggtaatatgttgtaagtattggggtttaggagtattaggttatattatgtagtttagatgggtaataggttatattatttaggtttgtgaaaatatattttatgatgtttgtataatgataaaattgtttagtgatttattttttagaatatatttttgttgttaagtaatgtatggttgtttttatgttgatatgattatatttataaagtttaaggaaagaaaatatttattgagtttattttttggtttttattatttattttataattgttattgagaataattttgttatataaagaatgtttaaatttgttttaattttatttatttatttatttgagatggagtttttttttgtcgtttagattagatcgtagtggtataatttcggtttatttgtttaggttggagagaagtggcgtgtttggttataaagtatttttttaaatgatttatttgaaaaataaaattttgttttaggtatggtggtttatgtttgtaattttagtacgttgggagggtgaggtaagaggatcgtttgagtttaggagtttaagaatagtttgggtaatatggtaaaatttcgtttttattaaaaatataaaaaattagttaggtgtgatggtgtacgtttgtggttttagttattcgagaggttgaggtgggaggattgtttgagtttaggaggtagaggttttagtgagttaagattaagtttttgtattttagtttgggtaatagagtgagattttgttttttatttttaaaaaaagaaagaaaataagaaaaatttgggtttgggtatggtggtttacgtttgtaattttagtattttgggatgttgaggtgggtggattatttgaggttaggagtttgagagtagtttggttaatatggtgaaattttttcgtttttattaaaattataaaaattagttaggtgtggtggtggtatacgtttgtaattttagttattcgggaggttgaggtaggggaattatttgaatttgcgaggcgaaggttgtagttagtcgagattgtattattgtattttagtttgggtgatagagtaagattttgttttaaaaaaaaaaaaaaaattcgtttttttgaattgtatttgattggattttttatttatgtataattttgt

SEQ ID NO: 199 - DNA, 6565 bp, Artificial Sequence
  chemically treated genomic DNA (Homo sapiens)
cgatttttaaattttataagggttatcgtagttttttgaagtagaaaatgtagtttattttttgttagtttatgggttatattttgatttaagtatttttacggtgggtatttgcgtttattttgtagttttcgttagagattatgttagaagatggcggtatataggttgagtaagaggtggtgaggttgatcggggtttatcgattatagaataggtttttttagagggatatgaagtatcgttaggttttttgagttttaagttgtggttcgtagtgttttggcgagtagttttgttaatttaattgttgaggtttagggttaagtatagtggggtatttaattttagtttgggttttagttattgtgtgtttagatgcgttaaagttattttcgtagtttattttgtattaattggagttttttataatttaggtgaattttagttttattgaggggaattgatttaaaatattttttacgtcggtttttattgatttgggttaatcgtgtgatcgcggtggttggtacgaatttgacgaattttagggttagtatagtttagttaaattttcgtttattgttaaaggtttattattgttgtttttcgtgggggtgtggttaggttaagcgttttgagttgcgttgttgcgtgtttgatatttgttttttttgatcgtggtgatttagagggtgatttatcggggtagggatgtttgtatgtgtaattttattaagagttaataggttacgattaaatttatttgtttatggggtggtatgagtttgtcgaaatatttttagtgtattgttttgaggaagtaagttatataaatcgtatggggtgtttttggggtttggttggttcggggtatggggttagtagcggtgtatatgttgagtaaggtgggtagggagttgtattgatggggttagtagaatgtgagttgagggaggatgatgtgttagttgaggggtgattgttaaaaatgtatttttttttttgttattatgtgaagaaggatgcgtttgtttttttttttattatgattttaaattttttgtggtttttttagttatgaggaattgtgagttaattaaattttttttttgtataaattgtttagttttgggtagttttttataagaatatgagaatggattaatataggtttaattttggttattttttaattttttaagttattggagttgattttttgggtagttttaatatgattattttttttattttttagttattagggtatattaggttttatgaattattgattttaatttttgggttggaggataggaaaatttttagtagaggttaattggagatattcgtttttttttaggatttttagaattattttaatattttgaaatgttttatttttagatattgggtaatgaatgttaagtataaaatattattgggtattgtggttaattaggaataatagagtagaagattatgatttattttagtttattttaaaatttatattttattgtatttagggttgggtttagaaaggggattattatttaattttagtaagttttaaaaaatagttgttttgattttatgtgaaattataggttattgattatattgtataatttatatttgggtttattgaatgatggtttaagataatttgtaaatttgatattatagtgagttatttaatgtttaatgtaattttttaaggtgatgaaattaattatttaggtagtagaataagttattgttatgtagtataaataattgtttattaattttttataattatttttgtgatattaagtagttttattaatagttttttttatataattttattttattatatattgatttttattatgagatatgatttttttgtggtgaatttatgttaaggtatttatttgagttttttgttgagaattaaattaattttattttttaaaggtcgattttttttaggaatggagaatttaggtttttttatttataattattagattttgttatttataaaattataaagaaagtttaagtatattttgggaatatatatatatttttatgtattatatataatatgtttttgaataatatcgtttttttttaacgttgatgagaaaaataattaatttttggttagggttatcgtttgtgtggagtttgtatgttttttttatgtttgtatggggtttttttaggtattttagtttttttttatattttaaagatatgtatattattttttttaaatgtatgtatagtttatatttattttagtgttttttattagaagtgtttttggtttttatttagaagtttggtgatgtttttgtgattagtaatatgttttaggaatttaatttttgtgtatatttagtagtttatggtaaaattggttttgttttatattgttttatttaaagttatagtttttaagaatttatagatgatattgaggattatttatgtgtatagatatgatggatattttgatatttagtggattttttttaaaaaattgaatttaaaagttttattaaaatttatatttattatttattatttaaatttaattatttttttttttggtattatttaatttatatttaatatttagttttaattatttgtaattgtgtatgatatagtaaagattttggggaggttaagatgggtagattacgaggttaggagatcgagattattttggttaatacggtgaaattttatttttattaaaaatataaaaaattagttaggtgtggtggtaggcgtttgtagttttagttatttaggaggttgaggtagaagaatggtgtgaattcgggaggcggagtttgtagtgagcgtagatcgtattattgtattttagtttgggcgatagagtaagatttttttttaaaaaaaaaaaaaaaaaaagattttgagttaaagtgtttaagttgaatgtattttgttatttataagataaatcgtgttaattttttgtggtttattttatttataaaatagagataataatagtttttgtttttagggttgttgtgggaattaaagatttagaataatgtttagtttttaattagtgttgttataattgtttgatataattgtattatatttgtgtattttgtagattgatattaaattatatttttaaaaataggtgtttaatgttttatttaattattttaaaatatgtttaattatgtttttattttatttttataatatttttataaaaattttttatatatagcgtttatttttggtttagttttttaggaaaataattttgagagttagttatttgaattaaagaaatattaatattattagattatattgggatttttgagattggtttttattaattttttagttacgggtttttgttattatttttattagtgatttaagtgttaaatttaaatgttttgtatttgttttattaaagagatgtagtatttgttttttttttattgtttttattttttttgttatgtttttttttataattataaatatttaggttttttaggttttaaacggggtattttttaatttttatatttttttttttggttatttttttttttttaatagtttaatttatttagatttttacgtttgaaattattttagatgttttagaggcgttttattattataatggtatattattttttatttttttatatgttacgttagtttttaaattgaaaatttgagcgtttatttttggtgtattatttttaaattttagatttttaaaatttagggttatgtaattttaaaaaatttttatttttttttttttattgtttttgtttaggttttattttttttagtagttgttttaaaggtttattttgtttttttttcggagtgttaatttttatcgaagtttttatttagttgttaattttgttttatgtttgataatttgttcgtgcgttgatatatataaaatttttaagataaaaattttttaataatggtaaatgaattttgggaattgtatatagattatatagatttataataagagaaaaggttttagattaatacggaaaattttttatttaattaatatttgtattggtaaattttattaagtaagattttatttaattttatattattttttattgaagaggttgtggttattttttggaaatatttgaatttatttttataagttagagaaatagcgttattcgaaatattattttttgggttcgagttttaaggtatttgataaacggagcgttgtgggtaggggtgaggtgttttttttagggttgggattttgttttgggcgagggcgtcgtagggtaaagattttatcgggtagtagaattcgggtagaaattagtaattgggtttttcgcgtagtagaaaaggggaatttagtcggggtttattttttttgttagcgtagatcgtaagtttggttttattttttcgtcgggagtcggtttggcgcgtttcgtttaggtatttcgatcgtgggtagtttgcgttcgtttgggttttatcgtttcggttcggtagatatttgagcggtggttagggtaggttttcgtttttgtcgatgtttatgttttgggatatagcgacgatgtagtttagcgaattaattatgatagtagcgggaggattttcgagttcgttcgttatagtagaacgcgcggttaagtttggcgcgaaattgtggtcgtttcgttttttcgtttttatttgtgtaggcgaggtttcgttttttcgtttcggcgtacgtagggtcgcggcgtgttcgcgttcgtagacgtttgggaattgcggtcgcgggttcgcgtttttcgtcgggttttgtcgtcgggttgttatttttgttttgttatgtttcgtcggaagtttgcgtcgggcggtttcgttgtttttagtttagtttttgcgaggtaagcggttttgagtcgatttttttagtttacgggaagtttgaaatttatttttttttttataggtgtagtcgattaggtggattttggcgttgtagcggtcgtagcgtttttagcgttcgttttttcgttttagttgtcgtcgtacgtagtaggttttgtttgggattgggtagggttatcggggttgggggggcggggtttgtgggtaaggcgggcggaggcgtggatttttcgttcgatgatagggttggaggaggaaggggcgggttgaagaaggggaaggtgggaagagtttagtcggggttataaattgggtgaagcgttgaggttttagtattttcgtttgaggagataggtaaaggttatgtaggtttttaatggtaggtttgagataggaatttaggttttttgatttttattttgatgagggggtttgtgggtaaggggtgcgttttttaatttttattttttttttttttttttggtggtcgaagagttttattgattttttaaaaaagtgttggattgggtgattagaagaaagttgtttttaggtttttagtttttaagattgtaatagtatggtttaatatttgaaattattacggttaaaagtagttatattgtgtagttttttagtgaatattttttgtagtttagattataaagtttgaaatatagtttgggtggataaagttttttaggatggtatagatgtgattaattatggagttttttttgttgtcgttttttaacgtaataagtacgtttgtttgtttttaaattagagatattgttataggaaaagtttaagggtgattttttatttgggttatttgtatagtattttttagattgaggttgtggaagggtattgaagattggtgtttagttatttatcgtgttttaatgtaggtggtagtttgggtgttttaaaattttgtttttttcgtatatattttttttttaaaatgattattttttttttgttttttttgaggacgagttacgtttttatgaatttattaaaattttgtatttattatttaaagggtagttggtgaaggatttatgtatgtttttggtaagttttttgttaagaaaaaatttataattttgttatatttttagtgatgaatataaattttttaaataggaaatatttaaattgtaatgaatatgttaaaaatgatattgtttttttattatttatttttttttttttgtgtttttgttatataattgtttattttttagaggtattttatttagtatatgtaagtagggtgatttaagttttataattagagaaagttgaaggtttattgaattaagatcggtagtagttttggttttaattaattttaaatacggtttgagttgttgaggtttttgattattagattttattttgttttttatggtgttaaaaatagtttatttatagggttttttagagttaaaagtagaggattttttgaagagtggatggtaaggaattttgttatttagttgtaaagtttaaattggtttatatacgttaggtttttttagagtagagataatatattattttttaattttttcgatatagg

SEQ ID NO: 200 - DNA, 6565 bp, Artificial Sequence
  chemically treated genomic DNA (Homo sapiens)
tttatatcgggaaggttagaaaatgatgtgttatttttattttgagaaggtttgacgtatgtgaattaatttaaattttataattgaatgataaggttttttgttatttattttttaaagaattttttatttttagttttggaaaattttatgggtgaattgtttttaatattataaaagataaggtagagtttgatagttaggagttttagtaatttaagtcgtgtttagaattaattgaaattaaggttgttatcggttttgatttaatgagtttttagttttttttaattataaaatttgaattattttatttatatatgttaaataaaatatttttaagaaataaatagttatgtagtaaaggtatagaggggaaaagataggtaataaaagaatagtattatttttgatatgtttattgtaatttaagtgttttttgtttaaaaggtttatgtttattattaaagatgtgataagattatgaatttttttttggtagaaaatttgttaaaagtatatataagttttttattagttattttttaaatggtgggtgtaaaattttggtgaatttatgaaaacgtagttcgtttttaaaaaaaatagaagaggagtaattattttaagggagaaatatatacgaaaggaataagattttgaagtatttaagttgttatttatattaaaatacggtaggtggttaaatattagtttttaatgtttttttatagttttagtttgaaaaatattgtgtaggtgatttaagtgaggggttatttttgggttttttttgtggtagtatttttggtttaaaaataaataaacgtatttattgcgttgaaggacggtaataggaaggattttatgattagttatatttatattattttaagaaattttatttatttaaattgtattttagattttataatttaaattataaaaagtgtttattggggaattgtataatatgattgtttttaatcgtagtgattttaaatattgagttatgttgttgtagttttaaaaattggagatttaagggtagtttttttttagttatttaatttagtatttttttaaaaaattagtaaaatttttcgattattaaggaaaaaaaaaaaggatggaggttaaaagacgtattttttgtttataagtttttttattagaatgggagttaggagatttgagtttttgttttaggtttgttattaaaaatttgtataatttttgtttatttttttaaacggaagtattaaaattttagcgttttatttaatttgtagtttcggttgggttttttttattttttttttttttagttcgttttttttttttttagttttattatcgggcggagggtttacgttttcgttcgttttatttataagtttcgtttttttagtttcgatggttttgtttagttttagatagaatttattacgtgcggcggtagttggggcgggaaggcgggcgttgggggcgttgcggtcgttgtagcgttagggtttatttggtcggttgtatttgtggaggaggaggtggattttaggtttttcgtagattggaagaatcggtttaaaatcgtttgtttcgtaggggttgagttggaggtagcgaggtcgttcgacgtaggttttcggcgagatatggtagggtaaggatggtagttcggcggtagggttcggcgaggagcgcgaattcgcggtcgtagtttttaggcgtttgcgggcgcgagtacgtcgcgattttgcgtgcgtcggggcgggggggcggggtttcgtttgtataaatagggacgagggggcggggcggttataatttcgcgttaaatttgatcgcgcgttttgttgtaacgagcgggttcggaggttttttcgttgttgttatggttggttcgttaaattgtatcgtcgttgtgttttagaatatgggtatcggtaagaacggggatttgttttggttatcgtttaggtatttgtcgggtcggggcgatgggatttaaacgggcgtaggttgtttacggtcggggtatttgggcgggacgcgttaggtcgattttcggcgagaggatggggttagatttgcggtttgcgttggtaggaagggtgggtttcgattggattttttttttttgttgcgcgggaggtttagttgttgatttttgttcggattttgttgttcggtgaggtttttgttttgcggcgttttcgtttagggtaaagttttagttttggagaaaatattttatttttatttatagcgtttcgtttgttaggtgttttagagttcgagtttaagggataatgtttcgagtaacgttgtttttttaatttgtaggaatgaatttagatatttttagagaatgattataatttttttagtagaaggtaatgtgggattaagtagggttttgtttgatgaagtttattagtgtaaatgttagttaaatggaaagtttttcgtgttaatttgggatttttttttttattatggatttgtatgatttgtatgtagtttttaaggtttatttattattattaaaaaatttttgttttagaaattttatgtatgttaacgtacgagtaaattattaggtatggggtagaattggtaattgggtggaggtttcggtggaggttagtatttcgaaaggaaaatagagtaggtttttggaatagttgttggaagagataaggtttgaataagggtagtggagaagagagggtaaaaattttttaaggttatatgattttggattttggagatttggaatttaaaggtgatgtattagggatgaacgtttagatttttagtttgaaagttggcgtgatatgtaaaggagtggagaataatgtattattgtaatgatgaggcgtttttaggatatttaggataattttaggcgtggggatttaggtgaattgaattgttggagggaagggaataattaaggaaaagaatgtgggggttgagagatgtttcgtttaaaatttaagagatttggatatttatggttgtaagaggaggtatggtagaggaaatggaaatagtaagaaaggagtagatgttgtatttttttaatgggatagatataaggtatttgggtttgatatttaggttattggtagagatgatgataagagttcgtagttaaagaattgataaaagttagttttaaaaattttaatatagtttggtaatgttaatgtttttttggtttagatagttgatttttaaagttatttttttaagaaattgaattaaaagtggacgttatatgtaaaaagtttttatagaagtgttataagagtaggatagagatataattaaatatgttttaaggtaattgagtggaatattaagtatttatttttaaaagtatgatttaatattaatttataaagtatataaatataatataattgtattagatagttgtgatagtattgattagaggttgaatattattttaagtttttaatttttataataattttagaagtaggaattattgttatttttattttatagataaagtaaattataaggggttaatacgatttgttttgtggatgataaaatgtatttaatttgagtattttgatttagaatttttttttttttttttttttaagagggagttttgttttgtcgtttaggttggagtgtagtggtgcgatttacgtttattgtaagtttcgtttttcgggtttatattatttttttgttttagttttttgagtagttgggattatagacgtttgttattatatttggttaattttttgtatttttagtagagatggggttttatcgtgttagttaggatggtttcgattttttgatttcgtgatttgtttattttggtttttttagaatttttattatgttatatataattgtaaatgattaaaattaaatattggatataaattggataatgttaaagggaaaaatagttagatttaggtaatgagtgataagtatgaattttggtaagatttttaagtttagttttttaaaggagatttattaaatgttaggatgtttattatatttatgtatatagatagtttttaatgttatttgtgagtttttggaaattgtgattttaagtgaaataatgtagagtaaaattaattttattataggttattggatgtatataagagttaagtttttagggtatattgttggttataaaaatattattaaatttttaaatgaaggttaaaaatatttttaatagaaaatattgaagtaaatatgagttatatatatatttaagaagaataatgtgtatgtttttgggatgtggaaggaaattggaatatttggagaaattttatgtagatatgggaaaagtatgtagattttatatagacggtggttttggttaggaattgattattttttttattaacgttagaagaaaacgatgttatttaaggatatgttgtatataatatatgaaaatatatgtatatttttaaaatatatttaggttttttttgtgattttataggtaatagaatttggtgattatgggtaagaagatttgggttttttatttttgagaagaatcgatttttaaagggtagaattaatttagtttttagtagagaatttaagtaagtattttaatataaatttattataagaaaattatgttttatagtggagattagtatatgataaaatgaaattgtataaaaggagttattgatgaagttgtttaatattataaaggtgattatagaaaattaataagtagttatttatattatatgataataatttattttattatttgagtaattgattttattattttgaaaagttatattaaatattaaatagtttattgtggtattagatttgtaagttattttgaattattatttagtaggtttaaatataaattatatagtgtaattaataatttgtagttttatataaagttaaaataattattttttgggatttgttaaaattaagtgatgattttttttttggatttaattttaaatgtaataaaatgtgaattttaggatgggttgaaatgggttataattttttattttgttatttttagttaattataatatttaataatattttgtatttaatatttattatttagtgtttgaaggtaaaatattttaaagtattgaaatggttttagagattttggagagaagcgggtatttttagttagtttttgttaagaatttttttgttttttaatttaggggttggagttagtagtttatgaagtttgatatgttttggtgattggagagtgggaggggtaattatattaagattgtttaggaagttaattttaatggtttgggaggttgaggggtggttagaattggatttgtgttaatttatttttatgtttttataaagaattgtttaagattgggtaatttgtataggaaagaggtttaattgatttatagttttttatggttggggaggttataggaaatttaaaattatggtggaaggggaagtaaacgtatttttttttatatggtggtaggaaggaaagtgtatttttaatagttattttttaattaatatattatttttttttaatttatattttattaattttattaatgtaattttttgtttattttatttaatatatatatcgttgttagttttatatttcgaattaattaaattttaaagatattttatacggtttatgtagtttatttttttaaagtaatatattgaaaatgtttcgataggtttatattattttataaataaataggtttggtcgtagtttattagtttttagtaagattatatatgtaagtatttttgtttcggtgagttattttttaaattattacgattaaaaggaataagtattaagtacgtagtaacgtagtttaaaacgtttagtttagttatatttttacgggagatagtagtgataaatttttagtaataaacgaaagtttaattaagttatattaattttagggttcgttaagttcgtgttagttatcgcggttatacgattaatttaagttaatagaaatcggcgtaaagagtgttttagattaattttttttaataaagttaaaatttatttgagttgtaaaaaattttagttgatataaaataaattacgaaagtggttttaacgtatttgaatatataatagttaagatttaaattgggattagatattttattatgtttagttttaaattttaatagttaaattaataaaattgttcgttagaatattacgagttatagtttaaaatttaaaggatttggcggtgttttatatttttttagaggagtttgttttgtaatcgataaatttcgattaattttattattttttgtttagtttatatatcgttattttttagtataatttttgacgaaggttgtaaagtaagcgtaagtatttatcgtaaagatgtttaggttaaggtgtagtttatgagttggtaagaaatgggttatattttttattttagaaaattacgataatttttatgaaatttaagggtcg

SEQ ID NO: 201 - DNA, 2891 bp, Artificial Sequence
  chemically treated genomic DNA (Homo sapiens)
  unsure (223, 366): unknown base
tttttttttttcgaattgtttttttttttggaggtggtggagggagagaaaagtttatttaaaatgtttttgggtgagggattaaggatgagaagaatgttttttgttttttatgtcgtggaataatataaaataaaaaatttcgagggaatatatattatatattaaatatagattattttagggagtaaataaattatgtgtggggttgggtaattagttnaagtcgaagcgtaaataaaatgtgaatatacgtttgcgggttatatatagtgtatttttattagtatttagaaaaaattgtgagttagtgaattaggaaattaatgtttggaaggtagttaaattttaattagtttaagattnttttttttttttaaaaaaaggtacggaagtaatatttttttttttttttttgattagaatcgatgtattttttgtgtatgatcgtatttttaataataaaaggggaaagaggatttggaaaggaattaaacgttcggtttgttcggggaggaaagagttaacggttttttttataagggtttttgttgattttttcggttcggtttataagttttttatttgttttttttaggaagttcggtttcgcggttcgggtattttttgttttttttatattttttcgtttagtatttttgattttttttaaattcggtagttcgagattgttgtaaatcggcgttatagggcgtaaaggggatttgttttttttgaaatttggttgagaaattgggaatttcgtgtgggaggcgtgggggtgggacggtggggtatagattggtagagagtaggtaatttttttttcgttttagtttagttttggaataggtagatatattttagggttaaatagacgtttttcgtacggggttttacggaagtttgagtaggcggggtaggagggtcggtatttgttgttttggtagtaaattgggggatttagtttgggtggaaggtatttaatttagatagttgtgtatatataatgtataatatatgattttttttaataaatgtaatgggagtttatttataacgcgttttttaagtatacgtggtaatgcgttgttgggttattttaattattttaggtatcgtttttttttttatgtttttattatttttttttatttatattaatattttacgttttgaacgcgcgtttattaatattttttttttttttattttttttgggatttttgattaaagcgcggttttttttttagttttagcgaggcgttttgtagtttggtacgcgcgtggcgtggcggtgggcgcgtagtgcgttttcggtgtggagggtagttgtttcgtttgcgatgatttatatttataggataaggatgcggtttgttaaatagtattgttacggaggagtagtagagaaagggagagggtttgagagggagtaaaagaaaatggtaggcgcgcgtagttaatttatgcggtttttttattttgtttatattttagagttagagtgttcggttgttcggttgagttttttttttattttttttattttttttattttttttataagcgtttttttcgggtttttaaagtagagggcgtgggggaaaagaaaaaagattttttttcgttaattttcgtttatcggttttttataatgcgagggtttggacggttgaggattttcgagttgtgttgttcgcggtcgttatcgtcgggtttcggtcgtttttggttttttttttgtttcgagaagggtagggttttttagaggtttggcgggaaaaagaacggagggagggatcgcgttgagtataaaagtcggttttcggggttttatttaattcgttgtagtaattttagcgagaggtagagggagcgagcgggcggtcggttagggtggaagagtcgggcgagtagagttgcgttgtgggcgttttgggaagggagattcggagcgaatagggggtttcgtttttggtttagttttttcgttgattttttaattagcggttcgtaatttttgtcgtatttacgaaattttgtttatagtagcgggcggatattttgtattggaatttataatattcgagtaaagacgcgattttttcgacgcggggaggttattttgtttatttggggatattttttcgtcgttgttaggattcgtttttttgaaaggttttttttgtagttgtttagacgttggatttttttcgggtggaaaattaggtaagtatcgaagtttatttgttttttaatttatttttttattattttaatgttgagatgagtcgaatgtttaaatagggtgtttttttttttatttttgcgttattgatattttttttagagtagttatggtaattggggttggggtggggggtaatttagaattggatcggggtaaagtgatttgttaagatggtagaggagaaggtagagggaaaacgggaatggtttttaagattattttttcgagatttttgttttatgaatatatttacgttgattttcggtcggtcggatatttttgttttattgtgttaattgttttttgcgttttggggggttgggggttgttttgcggtgggtagaaagttttttgtattttgagttttttggagtagggatcgtatatcgtttgtgtgagttagatcgtttcgtagtcgttgatttgttttcgttttcgggagggtatttaaatttcggtttatcgtatttttgatagtcggagacggatattgcggcgcgtttcgttcgtttgttttcgcggcgattgtaattcgttttgatttttttaagaagttggtatttggttttttaaaaaataataatataatttaaaatttgggtttttagaggtgttaggacgtggtgttgggtaggcg

SEQ ID NO: 202 - DNA, 2891 bp, Artificial Sequence
  chemically treated genomic DNA (Homo sapiens)
  unsure (2526, 2669): unknown base
cgtttatttaatattacgttttaatatttttagagatttaggttttaaattgtattattgttttttaaaaagttaaatgttaattttttaaaaggattagggcgggttgtaatcgtcgcggggataggcgggcgggacgcgtcgtagtgttcgttttcggttgttagaaatgcggtgagtcgaaatttaaatgttttttcggagacggggataagttagcggttgcggagcgatttggtttatataggcgatatgcggtttttattttaaggagtttaggatgtaaggggttttttgtttatcgtaaagtaatttttagttttttaaaacgtagagagtaattaatataataaagtaggaatgttcgatcggtcgggagttagcgtgaatatatttataaggtagaaatttcgaaagggtagttttaaaaattattttcgttttttttttgtttttttttttgttattttgataagttattttatttcgatttagttttggattattttttattttagttttaattattataattattttgagaaaagtgttaatagcgtaggaatgggagaaaagatattttatttaggtattcgatttattttagtattaaagtgataaaaaaataaattaaaaggtaagtggatttcggtgtttatttggttttttattcgaaaaaaatttagcgtttaagtagttgtaaggagagttttttagagaagcgggttttggtagcggcggggaagtgtttttaaatgggtagaatagttttttcgcgtcgggagagtcgcgtttttgttcgggtgttgtaagttttagtgtaaagtgttcgttcgttgttatggataaagtttcgtggatgcgataagggttgcggatcgttggttgggggattagcgggagggttgggttagaggcgaagttttttattcgtttcggatttttttttttaggacgtttatagcgtagttttgttcgttcggtttttttattttagtcggtcgttcgttcgttttttttgtttttcgttggaattattatagcgagttagataaagtttcgaaaatcggtttttatatttagcgcgattttttttttcgttttttttttcgttaagtttttgagaagttttgtttttttcgaggtaggaggggagttagggacggtcggggttcggcggtggcggtcgcgagtagtatagttcgggggtttttagtcgtttagattttcgtattataaagggtcggtgggcggagattagcgagagaggattttttttttttttttttacgttttttgttttgggaattcgggaggggcgtttatggggagggtggggagggtggggaaggtggggaggagatttagtcgggtagtcgagtattttagttttaggatgtaaatagagtaagagagtcgtatgaattaattacgcgcgtttattatttttttttgtttttttttaaattttttttttttttttgttgttttttcgtagtagtattgtttgataaatcgtatttttgttttgtgagtataaattatcgtaggcggaatagttgttttttatatcgagaacgtattgcgcgtttatcgttacgttacgcgcgtattaggttgtagggcgtttcgttaaggttggggaaagggtcgcgttttgattaagagttttagggagagtggaggaaagaagggtattaatgggcgcgcgtttagagcgtgggatgttagtgtagatagggaggaatgatagaggtataaggaggaaaacgatgtttagaatgattaaaataatttagtaacgtattgttacgtatatttggagagcgcgttatgaataaatttttattgtatttgttggggggagttatgtattatgtattatgtatgtatagttatttggattggatattttttatttagattgagttttttaatttgttgttaaagtagtagatatcggtttttttgtttcgtttgtttaggttttcgtggggtttcgtgcgggaggcgtttgtttagttttgagatgtgtttgtttgttttagagttgggttagggcgagagggaggttgtttgttttttgttagtttgtattttatcgttttatttttacgttttttatacggagtttttaattttttagttaggttttagaagagataaattttttttgcgttttgtggcgtcggtttgtaatagtttcgggttgtcgggtttgggagaaattaaaggtgttagacgggagaatatgggaggggtagggggtattcgaatcgcgggatcggattttttaaaaggggtaagtggagagtttgtggatcgagtcgggggagttagtagagatttttgtgaaaaaaatcgttaattttttttttttcggataaatcggacgtttaatttttttttaggttttttttttttttttattattggaaatgcggttatgtataaaaaatgtatcgattttgattaaagaagaggagaggagtattattttcgtgtttttttttggggggggggggnagttttgagttaattaaaatttggttgttttttaggtattaattttttagtttattgatttataattttttttgaatattagtgaaagtgtattgtatgtaattcgtaaacgtgtatttatattttatttacgtttcgatttnagttagttgtttagttttatatatgatttgtttgttttttgaaatgatttatatttaatatataatgtatattttttcgggattttttattttgtgttattttacggtatgaaaaataaaaaatattttttttatttttggttttttatttaaaggtattttaagtaaatttttttttttttttattatttttaaaagagaaaataattcgggggaaagggg

SEQ ID NO: 203 - DNA, 1092 bp, Artificial Sequence
  chemically treated genomic DNA (Homo sapiens)
aagttttttttttattatttaagaaggtatttaggtttttttgtgttaggttttaggtaaagtgttggattatttagtaattgggtttagtagtaggatggttttagattgaggttttagggttaaaggattatttttttttttagcgttggttcgggaaaggtaagtttcgggcgggagcgtacgtcgcgttttcgaagtttggttttttcgttacgtttattttttgtttttatttcgcgtttttttaggttttttttcggtgaatcggatgttttgttagttttttattttgcgttttcggtcgcggttcgggtttttcgtaaagtcgttgttatttcggagggtttagttagcgggttttcggaggttggtcgggtaggcgtggtgcgcggtaggagttgggcgcgtacggttatcgcgcgtggaggagatattgttttgtcgcgatgggggttcggggcgtttttttacgtcgtaggtaagcggggcggcggttgcggtatttgtttatcgggagttttttttttttttttttgttgttgttgttttgtatttagttcgggggaggatagaagaaaaaggaggtagaatggatttttttggtttttttttgtggtcgggggcgggttagggtgggtcgcgttgtttaggtagttttgtcgtgttgttaggtagtttggtcgtcggcgtgggcgatgtcggcgttggggcgggagtcgcgagggtgggaggttttggggcgttttcgggacgtggagttagtagggttttgatttgaaaaacgacggtaaagcgtgtttttgattgtttttgagtattttatattttttagatttagggcgtttttatttttagttggaagtttagtttagagtaatggtgttattaaaaggggtgtgttggatgtgaaaatattttttggaagtatttataagtttgtaggaaatatgttttttttatttttttattttgttttttttattatttattttaagaagtaatagaatttgtgtagagtgtgttttaagttatattgtatgtttatttttgtttatgttgaattcggtgtatatttgtgagaataagttt

SEQ ID NO: 204 - DNA, 1092 bp, Artificial Sequence
  chemically treated genomic DNA (Homo sapiens)
aagtttatttttataagtatatatcgagtttaatataaataaaaataaatatatagtgtaatttaaaatatattttgtataggttttgttgttttttgaaatgggtaatgaagggagtagagtaagaaaataaggaaaatatattttttgtaggtttataaatatttttaaagggtatttttatatttaatatattttttttagtggtattattgttttaagttgggtttttagttgggaataaaggcgttttgggtttgaaaggtgtgaggtgtttagaagtagttaagaatacgttttgtcgtcgttttttaagttagaattttgttaattttacgtttcggaaacgttttagggttttttattttcgcggttttcgttttagcgtcggtatcgtttacgtcggcgattaggttgtttagtaatacggtagggttgtttgggtaacgcggtttattttggttcgttttcgattataggggaaggttaaggggatttattttatttttttttttttttgttttttttcgagttggatgtagagtagtagtagtaggagaaggaagggaaagttttcggtgggtaggtatcgtagtcgtcgtttcgtttgtttacggcgtgaaggagcgtttcgggtttttatcgcggtagggtagtgttttttttacgcgcggtagtcgtgcgcgtttagtttttatcgcgtattacgtttgttcggttagttttcgggagttcgttggttgggtttttcgggatggtagcggttttgcgagggattcgggtcgcggtcgaggacgtagagtaggagattgatagagtattcggtttatcgggagaagatttggaaaggcgcgggatgggggtaggaagtgggcgtggcgagggagttaggtttcgggggcgcggcgtgcgttttcgttcggagtttgtttttttcggattagcgttgaggagaggagtggttttttggttttgggattttaatttgaggttattttgttattgaatttaattattgggtagtttagtattttatttggggtttagtatagaaagatttgaatgtttttttggatgatgaaggggaagttt

SEQ ID NO: 205 - DNA, 5203 bp, Artificial Sequence
  chemically treated genomic DNA (Homo sapiens)
agggaatttaacgttttttcggggtagaagggggtagcgcgcgcgaggcggaaggatagttattttcgttgtataaattttttcgcgggtcgcgtcgcgcgtgtaggggttggacgttattcggcgttagagtcgggtttgaggagcggggtttggtcgggaacgagggttgttagtttgggtggtgttatttgttgttttattttttatttttttttttttcgtgaggaattagaggtatcgggtcgcgcgggttgagaatttttaaatttttttcggtcgtattcggttgagttaattcgtagtttttgttagtttttttgtttttcgggtagcggtttttttcgttagttaggtttggaagttattttttgtgagattgggttaggaagtgacgaaaagcgtcgaattgtttttaaattgaaaatatttttttttttttttttggagatagcgttgataaatatatgggatttcggtttttgatttttggttgtcgtttttgtttttttgtcgttaataaaattcgtattgagttttttagtgttttgattaataggtagattaatttttattggggttgggaatagtttgttttaattaatgttattttaaaagttcgttaggatgcgtttagtttcggttttttggatgtttgagcgagttagttatgatatttgttttttttttttttttagttttaaattttttagtaaagtttttagttttcgtttgtttgtttttaggtttataacgggataaatcgtaggatcgggtcgttggtttttagaataggtagcggtttagagaggggatatttagggagaagggattgaggtggttttgatttgtttgttttttttttgaagttgaatttttgttttttgggggtagaggttatagggaaaagagagatggggggatcgttatagggtgatgaaatggaaagtaaatttttttaggaattttatttgtaaaaatcggagagtgtcgttgattttagttgttttatatgttaggagttttaaatttaatttttatttggataatagtatggagggattgggaggtaaagttttgggagtttgattcgttgggttgttaggaatttttttgttgggagattttattggataatgttattttaaaggtattttgggggtgggtagggagaagatagagagagaaagagagagagagagagagagagagagagagagagagagataggttggttttttagagcgaacggaagaggattgaggattgaatttagggagtttttagtattggttatttggtaggaggcgaggaagggcgagggtatcgcggtttttttttaagtcgagtagtggttatagtttgaaggtgttacggggcggttttgggatttttttggtttttttaggttttgggttcggcgaggttgtcgggttagcgggaatcggtaggttgttggagaaaggagagggataaaggtttggaagtgggggaggtattagggattgggcggtcgggatgggagtttttgtttttagggtttattggattcgtttgttagtttcgcggataagggattttatttttttagggtttgtaaaaagagagacgtttggggtattataaagtgacgtaggtgtttgttaagattttttttttttaaaaaatgttagtttttattttttttagcgcgtcggcgttgcgtttttgtttgatcggggaaagagagagtttggaggtgttagaattgttagaatttcggatgggaggtttttggttttgaagttgggagttggaggtatttttttttagaagtgggtatttttttgttttttcgaaggtttgatggggtgggtataggggaatgttagggatcggtgcgggtgagatgtttgttttattttatgttgacgtattaatattggttagaagttttgggtaggttttggcgagttacggttttttagcgggattttttttacgtagatagtttcgttatcgggtgggacgatttcggcggttttcgcgggaacgtattcgtcggtttgagaggttttttttttggttatagggggcggagggtaggggggaataggggtttgtggggaggcggggaaaggagatagaatttaaagcgtaattttcgtcgttttttcgcgttttggagggtagtaagtgggtttcgggcgtgttggtagtcgtaattaaaatggcgatttgcgagttgtttcggttttgtatatatttttggtaatcgcgttcgtattttagtttcggtttttatatttttaggtcgtttcgtttttagagtcggtatttggtagagggagtgaggttttttacgaggtagaatagtatttttattttttttgagattagtttagagagaacgaggaaattttatttttatttttttttttttaaattttgaaaattcggttttattttggggttgaatttttttttttaaatattgatatatgggaagtagttaagttttttttgttttttgtttgtgcggaggagtttttaggagtttttttcggagtttttttttttatttaatgacgttagtggtatttatttttcgttttttgttttttttgattttttgttaaaattttttttcgtagcgagatgggggttggaggggtgggagaaggagttgatttaaagagttagtgttttggggggaaatagtaataagattacggttgttttttttcgaggtaaagtttaagaaggtgttaatttattcggtcgttaattgagaggttgtaaaaatgatattcgtttttagttcggatagaattatttttttttttttcgttttttcgtaagtttttcgtttatgtatagcggatttgagttttgagtttaagtttttttaatgttcgtttggaaagtaaaaggagagagaaagagaaagtcgattttcgttggtttgggatttagggtcgcggttttatttgtcggtatttttcgaaagtcgcgtttttgcgaaatgaaatttcgtttaggaggtcgcggatttggatattcggcgttattttttttatttttgatttaggttttttttcggcgttgcgagttttcggggaagggttagagtcggtagttttttttagttcggggaggggagagggttatgcgattttatttttggttagggtcggggaggtttttgtttttcgggagttttgttcgggttttttggtcgtagggttgttgggttttaggtaggaacgagagggtgaggtttatatgtggttcggcggtttagggcggtttgtagcgtttttattgtttcggttgttaggggttgcggcgacgcggttagttagtagcgagtttaggtcgcgtagattttattgatgagttttgatttttagtattttttttaagttaagaagagtttagcgtatttttcggttgttttattttagtttttttgttttagttttttagttttattttttttcgttttgttttggggtgtgtatagtagtttaggttttttttttttttttcggtttcgtggttcgaagtcgtcgagagagttcgggatagcgtaggattaggtagtcgttcgtttttttgttattttaattgtaggtttcgaggggcgtttttggagtgtattgaggtgtgttttaatcgtgcggtatttaataaatggatttttggtgtgtggttagaagagaaaagttatttatttattttttttttcggttttttggtaatagttgaaggggagttgttttcgtggattgagtagatttaggagagggagtcgtggtgcggagatatacgtattatatatagatgatcggtggtatatacgatatacgttgatatatcgatatcgttagtgggatatatatatatatatatatatatatatatatatatatagagagagagagagaattttttttagtattggttattcgtttttttatttaggtttttattttttttttttttttattttttttggtttttttttttttcgggcgttgcgaaaagtagtcgtatttagttaataaatggtacgtgggagaagttggtgagtgtttggtgaggattttttagggttttttataagaattttttgtatataaagtaagtggcgtgtttattcgggtttttttagttagagttgtgtttttgtttcgttgcgtatcgcggttttcgaaaggagaaaggagagaagaaagggcggggagagcggggtggaggatttggataggttttggaggtttgggttggggaggtttttggtttcgtttagttttcggttcggtaattttttttcggtttaggtttcgtcgcggttttcgtagttggaatggagttgttaggatttagtgacgttttcgttttttttttttttttttaaggggttaggtgggttggggtgcggtcgtcgttgtgttttgtgttttggggtttcggttgggatggggtgggggcgggcgggggcggggcggtaggttacgttgttttggagttggtaagaaaggatagtatagaaatttgtatttttcgaggattgggagtttcgagtttagtttagggggagtgggggcgcgatttttaatttagaaatttttatttgatcgtttaagttcgcggtagtagggcgggtcgcgtcgaatttcggcgtgcgcggagcggggagatgtaggcgagcgttagagttcgggttcgggggttttgcgtcggggagaggagtcgggatttatcggcggagtcgaaaataagtgtatttatatttaaataaacggattaattgtattaggcggggagagggagtatttaatcggttggcgcgaggtttcggcgttgttttgtataaagtaatattttgtgtgagagcgagcggtgtatttgtatgttgcggagtgattagtgggtttgaaaagggaatcgtggttcggttttatttttcgttttggtttaggcgtaggaggaagtgttttgttggaggatgatgatagaggttaggtttcgttaatgggttagtgaggagcggtggaggcgaggtcgggcgtcggtatatatatattaatatatttgagttattattaattagtataggtgtgttggttgtagttattttttttatttatattttttattttttattttttagtcgttgatagtttattttattgttaatttttgttttttttttagg

SEQ ID NO: 206 - DNA, 5203 bp, Artificial Sequence
  chemically treated genomic DNA (Homo sapiens)
tttgggaaggagatagagattgataataaaatgggttgttagcggttggagagtgagagataaagagtgtgggtgagggaagtggttgtagttagtatatttatgttgattggtgatggtttaagtgtgttaatgtgtgtgtgtcggcgttcggtttcgtttttatcgttttttattggtttattagcgaagtttgatttttgttattattttttagtaaaatatttttttttgcgtttgaattagagcgggaaatgaggtcgagttacggttttttttttaaatttattaattatttcgtaatatgtaaatgtatcgttcgtttttatataaaatattgttttatgtaaagtagcgtcggggtttcgcgttagtcgattggatgtttttttttttcgtttggtgtaattggttcgtttgtttgaatatgaatatatttgttttcggtttcgtcggtgggtttcggttttttttttcggcgtagggttttcgagttcgggttttggcgttcgtttgtattttttcgtttcgcgtacgtcgagattcggcgcggttcgttttgttgtcgcgaatttgagcggttaagtgaaggtttttgggttgggggtcgcgtttttattttttttaagttggattcgggatttttagttttcggagggtgtaagtttttgtgttgtttttttttgttaattttaggatagcgtggtttgtcgtttcgttttcgttcgtttttattttattttagtcggggttttaagatatagagtatagcggcggtcgtattttagtttatttggttttttggaagaagaggaaaggggcgggagcgttattgggttttggtagttttattttagttgcggaggtcgcggcgaagtttaggtcgagaggaggttgtcgggtcgagaattaaacgaggttagaggtttttttagtttaagtttttagggtttgtttaaattttttatttcgtttttttcgtttttttttttttttttttttttttcggaagtcgcggtgcgtagcggagtagaggtatagttttggttggagaggttcgagtaaatacgttatttattttgtgtatagagggtttttgtgaaaagttttgaagagtttttattaaatatttattaattttttttacgtgttatttgttgattaagtgcggttgtttttcgtagcgttcgagaggaggggaagttaggggagataagaggggagggggagtggaagtttgggtgggggggcggatgattaatgttgggagggattttttttttttttttgtgtgtgtgtgtgtgtgtgtgtgtgtgtgtgtgtgtgttttattggcgatgtcggtatgttagcgtgtgtcgtgtgtgttatcggttatttgtgtgtggtgcgtgtgttttcgtattacgatttttttttttgggtttgtttagtttacggaggtagtttttttttagttgttgttagaaaatcggggaggaaagtaagtaaatggttttttttttttgattatatattagaagtttatttgttgaatgtcgtacgattaggatatattttagtatattttaaaggcgtttttcggagtttgtagttaaggtgataggagagcgagcggttgtttggttttgcgttgtttcgagttttttcggcggtttcgggttacggagtcgggaaggagaaggaaggtttgggttgttgtatatattttaggatagggcgagggggaatagggttgaagagttgaggtagggaggttgaaatgaagtagtcgaagggtacgttagattttttttgatttagggaaagtgttgaaagttagagtttattaataaaatttgcgcgatttgaattcgttgttgattggtcgcgtcgtcgtagtttttggtagtcgggatagtgaggacgttgtaagtcgttttgggtcgtcgggttatatgtgggttttattttttcgtttttgtttgggatttagtagttttgcgattaaggagttcgggtagggttttcgggaagtaaaggttttttcggttttagttagaggtggggtcgtataattttttttttttttcgggttggggagggttgtcggttttaattttttttcgggagttcgtagcgtcgggaggaaatttgggttagaggtgaaggaggtggcgtcgggtgtttaggttcgcggttttttgggcgaggttttatttcgtaggagcgcgattttcggaggatgtcggtaagtggggtcgcggttttgagttttagattagcgaaagtcggttttttttttttttttttttttattttttaagcgagtattaaagaagtttggatttaagatttaagttcgttgtgtatgagcgagggatttgcgggggggcgggggggggggaagtgattttgttcgaattggaggcgagtattatttttataattttttaattagcgatcgagtggattagtatttttttaagttttgtttcggaaagaagtagtcgtaattttgttgttatttttttttagggtattggttttttgaattagtttttttttttatttttttaatttttatttcgttgcggagaaaagttttaataaaaaattagaaaaggtaaggagcgaggagtgaatgttattgacgttattgggtggggaagggggtttcgggaaagatttttggaaattttttcgtataaataaaaaataaaaaggatttggttgttttttatgtgttaatatttggggaggggagtttaattttagaatgaggtcgagtttttaaagtttaaggagagaggggtgagagtgagattttttcgttttttttggattggttttaaggaaggtgggggtgttgttttatttcgtggggagttttattttttttgttaagtatcggttttgggggcgaagcggtttaggggtgtgggggtcgagattgaggtgcgggcgcggttgttagaggtgtgtataaaatcgagataattcgtaggtcgttattttaattgcggttattaatacgttcgaggtttatttgttgttttttaagacgcgggggggcggcggggattgcgttttaggttttgtttttttttttcgtttttttataggtttttgtttttttttatttttcgttttttgtggttagagggaggattttttaggtcggcgggtgcgttttcgcgggggtcgtcggggtcgttttattcggtagcggggttgtttgcgtggagggagtttcgttgggggatcgtggttcgttagagtttgtttagagtttttagttagtattgatgcgttaatatgaggtgaggtaagtattttattcgtatcgatttttggtatttttttgtgtttattttattaggttttcggggaggtaaagaagtgtttatttttggggggaagtgtttttagtttttagttttagaattaagagttttttattcggagttttgatagttttgatatttttaaatttttttttttttcggttaagtagaggcgtagcgtcggcgcgttggaaagggtgaagattggtattttttggagaaggaaagttttggtagatatttgcgttattttgtagtgttttaaacgtttttttttttgtagattttgggaaggtgggattttttgttcgcggagttggtaaacgggtttagtgagttttaaaggtaaaggtttttatttcggtcgtttagtttttggtgttttttttatttttaggtttttgttttttttttttttttagtaatttgtcggttttcgttaattcggtagtttcgtcgagtttagagtttagaaaagttaagaagattttagagtcgtttcgtggtatttttaggttgtggttattgttcggtttggggggaagtcgcggtgttttcgttttttttcgttttttgttaaatggttagtgttaggggttttttgggtttagtttttagttttttttcgttcgttttgggaggttagtttgtttttttttttttttttttttttttttttttttttttttttttttttttgttttttttttgtttatttttaaaatatttttaaaataatattgtttagtggagttttttagtaaagggatttttagtagtttagcgggttagatttttaaggttttgttttttagtttttttatgttgttgtttagataggagttaggtttaaaatttttgatatgtaggataattgaaattagcggtatttttcgatttttgtaaatagggtttttagaaaagtttgttttttattttattattttgtgacgatttttttattttttttttttttgtaatttttgtttttaagaggtaagagtttagttttaaaggaaaagtaagtaagttaaggttattttagttttttttttttggatattttttttttaaatcgttgtttattttaaaggttaacgattcggttttgcgatttgtttcgttgtagatttgggaataggtaggcgggaattgggggttttattgggggatttgaggttggggagggggagggagtaaatgttatggttggttcgtttaagtatttagggaatcgaagttaagcgtattttgacgggtttttaaaatgatattgattaggataagttgtttttaattttagtaagagttaatttgtttgttaattaaggtattaaggggtttaatgcgagttttattagcgataggagaatagaggcggtagttagggattaaaagtcgggattttatatatttgttagcgttatttttaaaaaaaaaaaaaaaagtatttttaatttgaaaataattcggcgtttttcgttattttttaatttagttttatagagggtgatttttaaatttggttagcggggaaaatcgttgttcgggggatagaggggttgataggaattgcgggttggtttagtcgaatgcggtcggggagaatttaagaatttttagttcgcgcggttcgatgtttttgattttttacgagaggaaagggaatgaaaaatgaagtaataaatgatattatttaggttggtagttttcgttttcggttagatttcgttttttaggttcggttttggcgtcgggtggcgtttagtttttgtacgcgcggcgcggttcgcgggaaagtttgtgtagcgagagtgattgttttttcgtttcgcgcgcgttgtttttttttgtttcggaggggcgttgggtttttt

SEQ ID NO: 207 - DNA, 8085 bp, Artificial Sequence
  chemically treated genomic DNA (Homo sapiens)
  unsure (2545): unknown base
gttttatgatttaattattttttaatatttttttttattaagattattatattggtgattgggttttgatatatagatttggggagaatataaatatttatattatagtatttattaatttatttagttattttattgttaggtatttatttagaaaaaatgaaaatatatgtttatataaagatttgtataatatttttatagtagttttatttataatattaaaaaaattggaaataatttagatatttatttatagttaaatggataaataaattatagtatataaataaaaagaataaaaagaattaattattgatatatattataatttagttgaattttaaaataattatgttgagtgagagaaattaaatgaaaaaaagatatattatattatatataattttaagaaataaaatttaatttatttggtatttagatttttatttttatattagttttaaataaaaagttttaaatttttttggataaatggttgattttacgattggggtaggaaatatataagatgagtttgatgagtttgtagtattttgtaatattagaaagtaggaaagtttatatatatatatatatatatataatatagagagtgggttaaggagtataagagttaattgaaaaagtttttagtgttaaaaattggaaaaatttgagtaataaagtatttatgaatttatataaagaaaagattgaataaagaagtaaatgggggagaagaagtaaattttttttatagaattttaaataaattatgtagatattttattttaaaggagggttagtataattttttatttttttatatttttttaagtgatttataatgatttttttttaaagagtatagagtatgtaaagagggaaaaaagagtaattatgtaatggagaaatttgataaatattattttagttaggtgatggagaataatattaatagttataagttatgttgataatatgtattttttatatgatgtaataaatatagtatattatttttttgatttttatttcgttaaaatttaaaattttagtttatttatgaggatatattaaattttaatagaagggtattttgtaatatattttattagtatttttaaggattgttaaggttattaaatataaggaaaatttgagaaatttttatagttaagaggagtataagatattataataattaaatgtggtgttttggatggaattttggaaaggaaaaaggatattaagtgaaaatgaagaaaatttaaataaattatgaatattagttaataataatttattagtattagtttattaattgtaataaatgtattttattaatttaaaatgttaatagagaaaattgtataaatgatatatgagtattttttatattatttgtttaatttttttgtaaatttaaaatcgttttttaaaagtaaaatttattaataaaatatttaaagtaaatagatttaaaaggtatatgtaaatgtataatttaatgtttaataaattagatataaatatttttaaaaatttaatatttggtgatagaaagtagattagtggtttgttagaaagtggtgattagtattaggggaaggggatgggatagaatagtatgaagggatttaaaaaatggtatgaggaaatttttggaggtaaagggtatgtttattattttagttttataggtttaataataaattatataatttaaatatatgtagtttattatatgataattatattttgataaagtggtttttttttttaaattatagaaaaaatatttttatatttaaatttttttttttaaaaatagtttttaggaatatttgaagttagttttattatatttgaatttaattagtgaattttgtttatttaaagatttatatatttgggaagtttttgtgttaaaaatgttaattatttagtattaaaatttatggaataatggtgatttaggatatgttggatatttttattgttgtttttttattttaagatttttaattttttggaaataatttttttagatattttgataagggaattattataattaattaaaattaagttaaatatagtttgttagatttaaaatgaggttaagtgttaattttatagtagcgatcggaaaattaaattatatggtatttgatatttaaaattatatttttaagaaggttgttatttgatgttttgggtttgggttatagtatttaattttataatattgggtaattttgtgttttagtttttttaattatgaaattgggataatagtatttattttgtgagattgttgaaggattatagttaatataggtaaaaggtttataagattatttggtaatgttgttttgattttataaattttatatattgtgtggtattagttattaggaaaatataaataaattagtgagatattattttatatatttggggggttataataaaaaagatagataaaaaatgttgttaaagatgtgaagaaattaggatttttatttattgttggtgnaaatgtaagaagtataattatttgaattatagtttggtagttattttaaagattatatttagagttgttatatgaattagtaattttatttttatgtatatatttaggagaaaggaaaatatacgttgtataaaaatttgtatatgaatgtttattagtaggattttttatggtagttaaaaggtgtaaataatttaaatgtttaataattgatagagatggataaataaaatgtggtttatttatataatgaaatattatttgttaataaaaaggagtgaaggagtgaagtattgatttatgtggaatatggatgaattttgatttaaaatagttaaattataggtataaaaagtatattagtggttgttgggagatttaggcggaaatgtggaataattgttagtgggtattgagattttagagttatatttatgttataaaattaatagtgttgatggttgtataattttgagtatatgaaaaattaatgaattgatattttgagtgagttgtatgatattggaattatattttaataaagtatggtaattgttttaagataggttggaaagagaaagtttgaaaataataataatgatattaataaattagtttatttttttagttttatatatttttgtgtttatatttgtttttgttttatttataatggtttttttgtagttgttatattatattttgttatttgatgttcggtgaatattttatatttgttttttagaattttttttattttttttttatttgtttaatttttatatatttaaaattaattagagtaaattatttattagaataattaattttaaattttagtaatttaatatgataaaggtttgttttttatttatatagtttttttttagatgatcgaggggtttaggttttttatttttagtggtttttttattttttggagttttttgtattttttatatatggttgagataaattatgagttattagtatagttagattttgaggttttataagaaaatttgtaaattatttattttgttttgaataaggtatatttaagatgatgttaaaatatttaatggttttgggttaaatatagtttatgattgtgtatttaaaatatatattgtaatatttttttttttttttattgattttatgaatttagcggggatttattttataagtttaaagataattattttttagattaagaatatttagggtaaaaagtattgtttaatatttttattgaggatgttatgatgtagtatattgtataagttggagttaaaggaaattttttttaaagtgttatttattaaaaattggaatatattttttaagataaatcgaagtgtggtatataatatttaaatttttattatagatatagaggtgttattattttttatttttaaatttttttgttacgttgaggatatttaagaggagtaggatatgttggtcgtagtaggagaaatttgaaagtatttatttttatggaatttataagggagagaattttttattttagtatcgtttttgatatatttattattttaaaagataatgtagttaaatgtttttttttgtgttaaatttttataaaattgaaattttaaaatggtgataaaaattttatttttgatagaatttatttatttttttaattagatagggtataatttttaatttgtaaaataaaacgtaatatgtttatgaggttttattttaaagaatttgttattgagagtagtatttagaataacgggtggaaatgttaattttagagttttagattttatcggtaattggggtagggaggggttttgggcggggtttttttagaggaggaggcgttgttagaaagttgtttggttagtttatagttgttattaatcggggtaagttttgttgtatttgtgcgtgtgggtggtatttttaatgagaattagttttatttgttatttgagtgaaatttataattcgaggcggttagtgttttcgtattattgggatttgagattttcggagatgattgtcgttcgtagtacggagttagtagaagttcgattttttttgggaatgggttgtatcgagaggttcgattagttttagggttttagtgagggggtagtggaatttagcgagggattgagagttttatagtatgtacgagtttgatgttagagaaaaagtcgggagataaaggagtcgcgtgttattaaattgtcgtcgtagtcgtagttatttaagtgtcggatttgtgagtattttgcgtttttagttttcggatagaagttggagaatttttttggagaatttttcgagttaggagacgagattttttaataattattatttttttttgcgttttttatttgtcgttcgttgggataaacgatagttatagtttttttgacgataggatggaggttaagggtaggagttgattagcgtcgttttttttcgttttcgatttaggaggtggagattttttcggtttagttatatttaatatttatttttttttttttttgtttttatattttcgaaatttttttttttttttttttttttttttttttggagacgggggaggagaaaaggggagtttagtcgttatgattgagttgaaggtaaagggttttcgggttttttacgtggcgggcggttcgttttttttcgaggtcggatttttattgttgtgtcgtttagtcgtaggttcgttttcggggagttagatttcggatattttgtttgaagtttcggttatatttatttttttggacgggttatttttttttcggttttgttagggataggattttttcgacgaaaagacgtaggattagtagtcgttgtcggacgtggagggcgtatattttagagttgaagttataaggggtgttggaggtagtagttttagttttttagaaaaggatagcggattgttggatagtgttttggatattttgttggcgtttttaggtttcgggtagagttaatttagttttttcgtttgcgaggttattagtttttggtgtttgtttggtttcgaatttttcgaagatttatcggttgttttcgttatttagcgggtgttgttttcgtttatgagtcggttcgggtgtaaggttggagatagtttcgggacggtagttgtttataaagtgttgtttcggggtttgttattagttcggtagttgttgttttcggtttttgagagtttttattggttcggggttttagtgaagtcgttttcgtaggtcgttgcggtggaggttgaggaggaggatggttttgagttcgaggagtttgcgggttcgtttttgaagggtaaatttcgggttttgggtggcgcggcggttggaggaggagtcgcggttgtttcgtcggggcggtagtaggaggcgtcgttttggtttttaaggaagattttcgttttttagcgtttagggtcgttttggtggagtaggacgcgtcgatcgttcgggacgttttcgttggttattacggtgatggattttatttacgtgtttattttgttttttaattacgttttattggtagttcgtattcggtagttgttggaagacgaaagttacgacggcggggtcggggttgttagcgtttttgtttcgtcgcggagtttattttgtgtttcgtttatttcggtcgttgtaggcgattttttcgattgcgcgtattcgttcgacgtcgagtttaaggacgacgcgtattttttttatagcgatttttagtcgttcgttttaaagataaaggaggaggaggaaggcgcggaggttttcgcgcgtttttcgcgtttttattttgtggtcggtgttaatttcgtagttttttcggatttttcgttggggttatcgttttcgttgtcgtcgcgagcgattttatttagattcggggaagcggcggtgacggtcgtattcgttagtgttttagtttcgtttgcgtttttttcggggtcgattttggagtgtattttgtataaagcggagggcgcgtcgttttagtagggttcgttcgcgtcgtcgttttgtaaggcgtcgggcgcgagcggttgtttgttttcgcgggacggtttgttttttattttcgtttttgtcgtcgtcgtcggggcggttttcgcgttttattttgtattcggttttaacgggttttcgtagttcggttattaggtcgtcgtgtttaaggagggtttgtcgtaggtttattcgttttattttaattatttgaggtgagggttcgggacggggtacgtttagcgcgttcgggagtagcggtttcgttggcggcggcggtcgttaatttttagttttagttttagcgtatcgttgcgtttttcggggcggtcggagagggtgggtagcgggatatagtataggggtagttgtttttttttttttttttttttttttttatttttggggatacgaaggtgggcgtagaatatattatttttggggcgtgtttttttgaaagttgtttttttgtttgttttttaatttttcgaattttttagatttcgaagtagaattaatttcgatttaaaacgtgtagcgttatattaggttcgttgtagtttagtggggtagaaagtgcgcggcgagttgggggttttatgaaatgttttttttttagaagaaggacgtttattaggagtgtttgttttggagaggagttaaggtatcgttttttcgggaggggtgggatttgagaggtggtcggttagaatcgaaagtagtattattttagggatttgaatattttagtggtttagtttttttaagaattttaagattaaaattaagtttacgtgggaaatgtttaaattgtggatttaaacgtttgttattgtattgtatcgtttttttattattgtttgttatttattataattttttttatatataggtttaaaaaatattattttgtatattgaagtaatggaatgtaaaaaaagaatgttttgtttggaattttatgttgtgaataggtaaaatagtgttagtgtattggataatattttaaaatgataaatatatatttgtttaagtaagtaatgattatagggttgtgttttaaaaatttaaaattaaaatattgtaaagtattatcgaatttttaaagttaaattatatttgttttgatttagtatatagataggaaggatataatattttatttgttaaagattaaattgtttttatataaagagttttgtagaaagatttttttttaatcgattttaattttttaggatataatattatatattaattattgtttttttatattggtgttattgatgaatggttaattatttgtaagtatggtgaatttagttacggatagtttattattaagtttagtttgtatgttttttaagtgtatatatatagttttgtttttaaaatttttttttattttgttaatattggtttaagaaatttttagtattagatagtggtgtatttaaaaataaatggagtattttgttttgtattttaagg

SEQ ID NO: 208 - DNA, 8085 bp, Artificial Sequence
  chemically treated genomic DNA (Homo sapiens)
  unsure (5541): unknown base
ttttgaaatgtaaaataaagtattttatttatttttaagtgtattattatttaatattaaaggttttttaaattagtattaatagggtgaaaggagattttaaaaatagaattgtatatatatatttgaaagatatgtaaattaaatttggtaatagattattcgtaattggatttattatatttgtaaatgattagttatttattagtagtattaatataaaagaataataattagtgtataatattatgttttagaaagttaaagtcggttaaaaggaaatttttttataaaattttttatatagaaataatttagtttttgataaatgaaatgttatgttttttttgtttgtatgttgggttaaaataaatatggtttggttttaaaagttcgatggtattttgtaatgttttggttttgagtttttaaaatataattttgtaattattgtttatttaagtaagtatatgtttgttattttaaagtattgtttaatatattgatattgttttgtttatttataatataagattttaaatagagtattttttttttatattttattattttagtatgtaaagtagtgttttttaaatttgtatataaaaaaaattgtagtgaatagtaagtaataataagaaaacggtgtaatgtagtgataggcgtttaaatttatagtttaaatattttttacgtgaatttaattttaattttgagatttttaagaaaattgagttattgaagtgtttaaatttttaagatggtgttgttttcggttttggtcggttattttttaagttttatttttttcgggggaacggtgttttaatttttttttaagataagtatttttggtaaacgttttttttttaagaaagaagtattttataaagtttttaattcgtcgcgtattttttgttttattgggttatagcggatttagtgtgacgttgtacgttttaaatcggggttggttttgtttcggaatttggaagattcggaaagttaaaaaataaataaaaaaatagtttttagggaggtacgttttaaaaatagtatattttgcgtttattttcgtgtttttaagagtgaggagaggagggaagaagaagggaggtaattgtttttgtgttgtgtttcgttgtttatttttttcggtcgtttcggggagcgtagcggtgcgttggggttggggttgagggttggcggtcgtcgtcgttaacggaatcgttattttcggacgcgttgggcgtgtttcgtttcgggtttttattttaggtagttgagatagggcgggtagatttgcggtaggttttttttgagtacggcggtttggtagtcgagttgcgggagttcgttgaggtcgagtgtagggtagagcgcgggggtcgtttcggcggcggcggtagaggcggaggtggagggtaggtcgtttcgcgggagtaggtagtcgttcgcgttcggcgttttgtagggcggcggcgcgaacgggttttgttggggcggcgcgtttttcgttttgtataggatgtattttagggtcgatttcgaggaggacgtagacgagattgaggtattggcgggtgcggtcgttatcgtcgttttttcgggtttggatggggtcgttcgcggcggtagcgggggcggtggttttaacgggaaattcgggaaggttgcggggttggtatcggttataaggtaggaacgcggggagcgcgcggaggttttcgcgttttttttttttttttttatttttagagcgggcggttggaagtcgttatagagagggtacgcgtcgtttttgggttcggcgtcgggcgggtacgcgtagtcggggaagtcgtttatagcgatcggggtggacgaggtatagggtgaatttcgcggcggggtaaaggcgttggtagtttcggtttcgtcgtcgtaattttcgttttttagtagttgtcgagtgcgggttgttaataaggcgtgattgagaggtaggataggtacgtggatgaaatttattatcgtggtggttagcggggacgtttcggacgatcggcgcgttttgttttattagggcgattttgggcgttgagaagcgggaattttttttggggattagggcgacgttttttgttgtcgtttcggcgggatagtcgcggttttttttttagtcgtcgcgttatttagagttcgaggtttgttttttagaagcggattcgtagatttttcggatttagagttatttttttttttaatttttatcgtagcggtttgcggagacggttttattggggtttcggattagtgagggtttttagaggtcgggagtagtagttgtcgggttggtgataggtttcggggtagtattttatgggtagttgtcgtttcggagttgtttttaattttgtattcggatcggtttatgagcggggataatattcgttgggtggcgggggtagtcggtggattttcgggaagttcggggttaaataggtattaagagttggtgatttcgtaggcgggagggttgggttggttttgttcgggatttgagggcgttaatagagtgtttaagatattgtttagtagttcgttgtttttttttgggggattagaattgttgtttttagtattttttgtagttttagttttggaatatgcgttttttacgttcgatagcgattgttggttttgcgttttttcgtcggaggggttttgtttttggtagggtcgagggaagagtagttcgtttagggagataggtatggtcgaaattttaggtaaggtgttcgaggtttggtttttcgggaacggatttgcggttgggcgatatagtagtggggattcgatttcgggggagggcgggtcgttcgttacgtggggagttcggggattttttgtttttagtttagttatgacgattggatttttttttttttttttttcgtttttagggaggagggaaaagggaaggaggagggggtttcgggaatataggggtagagggaggagaaagtgggtgttgaatgtggttggatcggagggatttttattttttgggtcgggggcgggggagggcggcgttggttagtttttgtttttggtttttattttgtcgttaggggaattgtggttgtcgtttgttttagcgagcggtaagtggggagcgtaagaaaaagtagtaattgttaggagatttcgttttttaattcggggagttttttaagagagttttttaatttttgttcgaggattggagacgtagagtatttataagttcggtatttgagtggttgcggttgcgacggtaatttagtgatacgcggtttttttatttttcgattttttttttggtattaaattcgtgtatgttgtgaagtttttagtttttcgttgagttttattgtttttttattaaaattttggggttagtcggatttttcggtatagtttatttttaggaagggtcggatttttgttggtttcgtattgcgggcgatagttattttcgaagattttagattttagtagtgcgggagtattagtcgtttcgggttgtagattttatttaaatgataagtgaagttagtttttattgagaatgttatttatacgtataaatataataaggtttatttcgattagtgatagttgtggattggttagatagttttttaataacgtttttttttttagggaggtttcgtttaaagtttttttttattttaattatcggtaggatttgaaattttggagttggtatttttattcgttattttgaatgttatttttaatagtaggttttttgggatggaattttataagtatattacgttttgttttgtaaattaagaattatgttttatttaattggaaaaatgaatagattttattagaagtagaatttttgttattattttaagattttagttttgtaaagatttaatatagaggaagatatttggttatattattttttaaaataataaatgtattaaggacgatattaaaataagaaatttttttttttatgagttttataaaagtgaatgtttttaagttttttttgttgcgattaatatgttttgttttttttgagtatttttagcgtgataaagaaatttgggagtgggagatggtaatatttttgtatttatgatggaagtttggatgttgtgtgttatatttcgatttgttttaaggaatgtgttttaatttttagtaaatagtattttaaggaaagttttttttagttttagtttatatagtgtgttatattataatatttttagtagagatgttgaatagtattttttattttaaatatttttagtttgaaaagtaattatttttgagtttataaaatggattttcgttaaatttatgaagttagtagaaaaagggaagaatattgtaatatatattttagatatatagttataaattgtatttgatttaagattattgggtattttaatattattttaaatatattttgtttaaaatagagtgaatgatttgtaaatttttttgtaggattttaaggtttagttgtgttaatgatttatagtttattttaattatgtataaagaatgtagaagattttagaaggtgggggagttattagaggtaaggagtttggatttttcgattatttggggaggggttatatgagtgagaaataaatttttattatgttaggttattaggatttggagttggttgttttagtaaatagtttattttgattaattttagatatgtggaagttaggtagatagaggaaaggtaaagagaattttgggaagtaggtatagaatgtttatcgggtattaaatggtaggatataatatggtaattgtaaggggattattatgaatagaataggagtaagtgtgggtatagaagtatatgagattagagaagtaaattaatttattaatattattattgttgtttttaggttttttttttttagtttattttaaaatagttattatgttttattgaggtgtaattttagtattatatagtttatttaaagtattagtttattgattttttatgtatttagagttgtgtaattattagtattattaattttgtaatatgagtatgattttaaaattttaatatttattagtagttattttatattttcgtttaaattttttagtagttattaatatgttttttgtatttgtgatttggttattttggattaaggtttatttatgttttatatgaattagtattttatttttttatttttttttattgataaataatattttattgtatggataaattatattttatttatttatttttattagttgttggatatttgggttgtttatattttttggttattatgaaaaattttgttaatgaatatttatgtataagtttttgtgtagcgtatattttttttttttttggatatatgtataggagtggaattgttggtttatatggtaattttaggtgtggtttttggagtaattgttagattatggtttaaatgattgtattttttatatttntattagtagtgaataagggttttagtttttttatatttttgataatattttttatttgttttttttgttatagttttttaagtgtgtgaagtggtattttattgatttatttatatttttttgatggttaatgttatatagtgtatagaatttgtaaaattaggatagtattgttaggtagttttgtaagttttttatttgtgttaattgtaattttttaatagttttataaaataggtattgttattttaattttatagttgggaaaattgaggtataaggttatttagtattataaagttaagtattgtaatttaaatttaagatattaaatgatagtttttttaggagtgtgattttaaatgttagatgttatataatttgatttttcggtcgttgttgtaaaattggtatttggttttattttaaatttgataaattatatttggtttgattttggttggttataataatttttttgttagaatgtttggggaggttgtttttaaaagattgaaaattttgaagtgggaaaataataataaagatgtttagtatgttttaaattattattattttataaattttgatgttgggtgattagtatttttggtataggaattttttaaatgtatgaatttttgaatgaataaaatttattgattaaatttaggtgtgatggggttaattttaaatatttttgaagattgtttttggagaagaggatttaaatgtggaagtattttttttatagtttggggaaaaaaattattttattaagatatagttgttatataataagttgtatatatttaaattgtataatttgttgttagatttgtgaaattaaaatgataaatatattttttgtttttaaaagtttttttatgttattttttaaatttttttatattgttttgttttattttttttttttagtattaattattattttttggtaagttattaatttgttttttgttattaaatattaggtttttaaaaatatttatatttgatttattaaatattaaattatatatttgtatatgttttttaggtttgtttgttttagatgttttattaatagattttatttttgggaaacgattttggatttatagaaaaattgagtagataatatagagaatgtttatatattatttgtataattttttttgttagtattttaaattaatagggtatatttgttataattaatgaattaatattgataaattgttattaattaatatttatagtttatttagattttttttatttttatttaatgtttttttttttttttaggattttatttaggatattatatttaattgttatgatgttttgtgttttttttggttgtgagagttttttagattttttttgtatttgatgattttgatagtttttaggagtattggtgaggtatattgtaagatgtttttttattgggatttgatgtatttttatgagtagattagggttttgggttttggcggggtggaaattaaagaggtaatgtattgtatttattatattatatgaagggtatatattgttaatatgatttatgattgttaatgttgttttttattatttggttgaagtagtgtttgttaggtttttttattgtatagttatttttttttttttttttgtatattttgtattttttggaaggaaattattatgagttatttaaggaagtgtgggggagtagggagttatgttagtttttttttggagtggagtatttatataatttatttggaattttgtgaggaagatttgtttttttttttttatttatttttttatttagttttttttttgtatggatttatgaatattttgttgtttaaatttttttagtttttggtattgggggtttttttagttgatttttgtgttttttgatttattttttgtattgtgtgtatgtgtgtgtatgtgtggatttttttattttttggtattataagatgttatagatttattagatttattttgtatattttttgttttagtcgtagaattagttatttatttaaggaagtttgagattttttatttgaaattggtatagaaatgaagatttgggtgttaaataaattaggttttattttttagaattgtatataatatagtgtattttttttttatttggttttttttatttagtataattattttgagatttagttaaattatagtatgtattaatagttaattttttttattttttttatttatatattatagtttgtttatttatttaattgtggataaatatttgagttgtttttaatttttttggtattataaatagagttattatgaaaatgttgtataagtttttgtatgaatatgtgtttttattttttttgggtaaatatttagtagtgaaatggttggataaattagtaggtgttgtgatatgagtgtttgtgttttttttaaatttgtgtgttaaaatttaattattaatgtgatagttttagtaggaggaggtgttggggagtgattaggttatggagt

SEQ ID NO: 209 - DNA, 7110 bp, Artificial Sequence
  chemically treated genomic DNA (Homo sapiens)
tgttttttgtgatgttttagaggttagaaggatgttttgaaggggaaaattgtaggagttaggtagagtagggttttggtttttttttaatgtttttttatttagataaattcgggttattttgtagaggttgtagtgagttatgattacgttattgtattttagtttgaggaatagagggagatttcgttttaaaaaaaaaaaaaaaaaaaaaaaaaaaaaaaaaaaaaatttcggtttattttatgaagtatttggtaggtgttttaatattttttggtatatgggaattatttttttttattattggaaggtttaaaaagtaaataatgtgttttatatggttagagttagtattaaggggattaagtagaataattggtagttagtgttagtttggagattaatatagttaaagttgttttgttatgttatgttttttttatttgtattgttttacggtttaagataaaatttttgaacgttatttggatatagtgagtatttggtttgttttattgtttttaggagtaattaatttaatttttatttttttgagaatgatgattttatatagtatatttttttattaagatgtgaaagatgatattatggtatttgaaatagttttaggagagatttgggatatgggaagtttgtagataataatggaaaatttttttttagaatatagttatttgtatgatttatagtagcgttttttggagaatgttttaaaattatttttattgaaagaataataatgtttgttattaggataaatgaaataaggggaaaattttagatttttggaataatgggtttatatttaatttaatgattattatgtttttatattttgtattatttagaaaatagtagttaaatagatagaaatatagaagattgtttaaaaattaaagttattgagttagatttttttttgaaaggttagcgtatgggagatgagaaaggtattatagagattagagtgtttatataaaagatattttagtagatgatttataaagagtatattaagtatttatattatttatattaagttgttggttatttcgtttattaaagaaaataagaaagaaattttttttcgatattattttggtgtagtaataatagagttttggaattagttgttagaagcgataattaaagttagtttattatgtttattaattaatttatatagttattttgaagttttatataattgtttttttgttataagtttttatttttttttatggtattttggttttgaatttagataggtaaagaattaagtatggtcgggcgcggtggtttacgtttgtaattttagtattttgggaggtcgtggcgggtagattacgaggttaggagatcgagattattttgattaatatggtgaaattttgtttttattaaattataaaaaattagttcggtatgatggtgtgcgtttgtagttttagttattcgggaggttgaggtaggggaattgtttgaatttgggaggtagaggttgtagtgaatcgagattatgttattgtattttagtttgtgagatttcgttttaaaaaaaaaaaaaaaaaaagaaaaaaaaaaaaagaattgaagtgtttggagattagtgtattgtaatatttatatagttaagtaggtatttttaattgaattttaaaaaagtattatttttgaaattttttttagtttagatagggttagttatttgggtagaaaggaaaagaaaaataaaaaattggaaaaggatgtattagtattttttttagaaataatttaatattaggaatagaaggaggattttatttattaatttttaataattatttgatgttgttgttgggttggttaaatatttgttaatattgatgatttttttatttattattagagagaagtagagggatttgatgtttagagaagtagtaaaatttattttttattttttttttttagtcggatggaagtatttggaggttggttttatattttagtattttagtgttggtgatgtagattatttttgttttagagtaattttgtgttatggaatttaagaggattttgtcgtattaggataggaatgtatttttgttttatttgtttttatgaaagtagattttagagatttttagatgttatgagattaattgttatttagggtaggttttaggggagggatagagaagggtagtgttaataatagggattttggagataagattagtaatttaagaaataaatgtgagatattttatttttttttaatttattttttttttaaaagtttatttttattttttttttttttattacgtagtaattgataattaaatatagttttggtttttattatgtaatttagtagaatatttagatattaggaattttttatttttggttatttatataataatgaaatttgtagtttacgttaggttgtgtggatagtatttgtatttttggaaattaattggaggttttttttttattttttttcggttgttttttatttttttttttattgtggtttttgttttttttaagttgattagaattatgtataaaattagtttttaataaatattaatattgaagttttagtaggttgttaatttttgtatagttattttaaatgttgtatataagtgtaaagttttatggagttttagaggtttttaagaatattgtaaatattttaggtttaattagtagtttcggagttaggtaatggtttgtggttttttgcgttaggttttttgaggtttttagtttttagaggttgtttgtaattatgatgtgtatatatatagtatttttttttaaatatagtataaattttttttagattttgttaggtatttataattattgaatatatatgtagattgatttttatttttttaaagtttgaaaaataatttagtgttttaatttaggtttcgttagatattttttgatttaaattgtcgtttgtagttttattttttaagggaaatgaaaaaataataaatttttagattggtgttgatgtttattttttttaagcgggtcgattatttgttttgtagatttttgacgggtggggtgcggggtaggagtgcgatttaatttttagtattttcgaattagtttttttacggtgataggttagtttaatcggggttgtaaatagatttgataggtttgttttgggttgacggttattgattaggtttttagattagataagttatttggttgagtttatagtaggtggggcgcgtttattagtttaggggtagtgattggacgtttgttgtaatatcggagaatgtacgttttgggttgtagtaggagatatttttaagtatagaattaaaagggtttattttaagcggtagggtattagcgatggagaggttcgagagttttagcgtttagtttttttttttacgtttgggaaggcgtagaataggtcgatgtagagtaaggagtgagttttaggttttagttttttggtttgtttttagggtagtaggcgaggagtggtattagtttggggatttttttttcgcgttttgtaagaatcggcggtagttagtaggcggggaggcgggggtacgtgtttggatgtgggtgtttgtgtaattagttttttaagcgttagtttcgatagcgttttttcgggaggttggttcgagtttttgttttcgtcgcggcgtaggaagggttggggtttcgttgtttgtattaggtaagagtatttcgagtaaaggaagaagacgatttgttttcggagttattattggggagtgggaatttggaaagttttttaattagggatatacgtgatttttttcggaaagtagtttcgattgtggttcgtgtatttttttatttttttttgaatttttttaggttttttcgtttcgtttattcgttgggttgtagttttttatcgtttcgtattttttatttaattcggtaattttaaacgtgtacggttcggtcggggcgcgcggagtttggtttcgggcgatttattttgtcgggtttttacggcggttaagggggggcggggttaggtggtttttgagaatcgagtttgatttcgacgtcgcgaatcgatttggagttcgaggggaaagatgttcgatttttttgggggtatcggagcgggcgtaggagaggtttgcggggtgcgttttatttatagggatttttttttagtttatttagataggtgttttttgggtttttgaaatttaacggttatgtgtttacgtttagtacgttcggttgagagtttttatttttagggtaaacgagtcgagttatcggggaagcgagaggtggggcgttgtaagggagtcggatgaggtgatatacgttggcgatataatagtaggttgttttttgtgttaagattgatattatgaggatatagatttgggggaagggggaatttttaggtaaaggttgttatagttaaatttttgcgaacgattgtgattcgatagcggtgtaaaaggaaagagcgaatgtagtttacgtcgcggaaatttaggggtagaggtaaggggggagggtattttttttgtagggatcgtttttgtatttttttttatattgagtagcgtggttatttggttttttttatttgtgtataggtaattttagattcgagttagtgatattgtttaacgtatttattttagtttttattattagttttttattttcgttttataatagtttattttgttttcggttgggtttttgggtagaggtcgaggtttagttcgttattttcgtttcgcgttgttgtaaaagtcgtagtaagtgtagttgtaggttggcggttgggaatcggttcgagtaagttttaggtagttatattgggtatgtttagtagagtttgcggtttggggattttgcgttcgtatttagagttatcgttttgtttttttttatcgttttttgttttgttttgtttttttttcgttcggcgcggtttcgttcgtttttcgttcgtttttcgttttttttcggtttttcgaggcgttcgggttttcggcgcggcggcggagggggcgggtaggtcggcgggcggtgatgtggcgggattttttatgcgttgcggtaggatacgcgttcggcgttgggacgcgattgcgtttagtttttttttttcggaagttgtagttatgatggaagtttgagagttgagtcgttgtgaggcgaggtcgggtttaggcgagggagatgagagacggcggcggtcgcggttcggagttttttttagcgtttgtgagtagtcgcgggggtagcgttttcggggagtcggtcggtttgcggcggcggtagcggcggcgtttttcgtttttttttcgttttttttaatcgtgtagtttttttttcggttttttttgaaagggaaggtggaagtcgtgggttcgggcgggagtcggttgaggcgcggcggcggcggcggtatttttcgtttttggagcgggggggagaagcggcggcggcggcggtcgcggcggttgtagttttagggagggggtttgagtcgtttgttattatttttagggttgggaacgtcggagagttggtttttttttttttattgtttttaatacggcggcggcggcggcggtatatttagggattcgggtcggttttaaatttttcgttcgtcgtcgtcgtatttttcgtggttcgggtttcggaggtcgtcggcggaggtagtcgttcggaggattattcgttttttttttatttcgttgtcgtcgttgttaggtttttggttgttgaggagaagtaggtttagtcgttgtaattatttagtagtcgtcgtagtagttattattcggttgcggtttagagttaagcggcggtagagcgaggggtattagttatcgttaagtttagagttatttttattttgtagaagaagtttcgttattagtagtttttgttatttttttttttttttttttttagttataggtttttagatatgatagttattattaaagagatcgttagtagaaataaaaggagatattaagaggatggattcgatttagatttgatttgtatttatttttgcggttgtttttttttatttttttgttatttttttagaacgtgggagtagacggatgcgaaaatgttcgtagtttgggtgattataatatttaattttggttaggttgttaggttatatattttgtgttttttttttgtgtatttaatttagggtgtgtttggttagacggaatttttgtttggttgtaagtgttaagttatcgattgtttttttaggttatttatatggtttttttttgagggttattgttcgttaatatagaatatagtatattgttagtggattagcgagttcggtaattcggttttttaaatgaataaaaaagtagacgttttttgaggttgagtatatttcgattaaattttggtttaggttttagattaagggtttagattagaataaaatgaaaattagtgttgtacgtacgtatattgtattagaattttgtagtgattgttttagttttttgagttgtattgatagatttttttaaaatatgattgatttgtataattttagaagtagaattatttttagtatatatggtgtatattgagggtaaaaagtagttttgttaatgtttaaatttaagttatttataattttgaattgtatgtagaagttttgtagtttgaagttaatagtgttataatatattttataaggcgtttttattagatttttgttatatttatttttttttttttttatggggtgatgtaggatagtgtttgaaatttgtattttagtagtatttaatgtttagtgtttttgttataaatatagaatggatattgagtagtttttgattttagatggtaatgtgtaggtttaagggtattgtgtgtagtaagtgaagattgtagaaataaaattttagtttatgtttgaaatttaagtattgttgtgatgttagaattgttgtttatcgtttttaggttttaggttttttgatattttttggtatcgttaattttattgatttg

SEQ ID NO: 210 - DNA, 7110 bp, Artificial Sequence
  chemically treated genomic DNA (Homo sapiens)
taaattagtaaaattaacgatattaaaaggtgttagaggatttgaaatttaaaaacggtgagtagtaattttggtattataataatatttaaattttaagtatgaattgaagttttatttttgtaatttttatttgttatatataatatttttgaatttatatattattatttgggattagaaattatttaatatttattttatgtttatgataagagtattgaatattaaatgttattgaagtgtaaattttaagtattattttatattattttatagggagagaaaaaggtaaatataataaagatttagtaagaacgttttataaggtatattatggtattattgattttaaattataaaatttttatatatagtttaaagttgtaggtaatttaagtttaaatattaataaaattattttttgtttttaatgtgtattatatatattgaaaatgattttgtttttaaagttatgtaaattagttatattttaaaagaatttattaatgtaatttaggaaattaaaataattattgtaagattttgatgtaatatgcgtacgtgtaatattaatttttattttattttgatttaaatttttgatttagggtttaagttaagatttaatcgaaatatgtttaattttaaaaagcgtttatttttttgtttatttaggagatcggattatcgagttcgttaatttattaatagtgtattgtattttgtattaacggataatagtttttaggaagagattatatagatagtttaagaaagtaatcggtggtttgatatttgtaattaggtaagagtttcgtttagttaaatatattttaggttgaatatatagaaaggaaatataaaatatatgatttagtaatttgattagggttaaatgttatagttatttaaattacggatattttcgtattcgtttatttttacgttttaagagagtgatagaaaggtaaagaggagtagtcgtagaaatggatataggttaagtttaagtcgaatttatttttttgatatttttttttgtttttgttaacgatttttttgatgatggttgttatgtttgggagtttgtggttgaagaaaaaggaggagagagatggtagaagttgttggtggcggggttttttttgtaggatggaaatggttttggatttggcggtagttgatgtttttcgttttgtcgtcgtttggttttggatcgtagtcgggtaatggttgttgcggcggttgttggatggttgtagcgattgggtttgtttttttttagtagttagaggtttggtagcggcggtagcggaatggggagaagacgaataatttttcgaacggttgttttcgtcggcggttttcggagttcgggttacggggggtgcggcggcggcggacgggaggtttaaaatcggttcgggtttttggatgtgtcgtcgtcgtcgtcgtcgtgttggaggtagtagaaggggagagattaatttttcggcgtttttagttttggaaatggtgataggcgatttagattttttttttggagttgtagtcgtcgcggtcgtcgtcgtcgtcgtttttttttttcgttttaggagcgggaggtgtcgtcgtcgtcgtcgcgttttagtcggttttcgttcgagtttacggtttttatttttttttttaggagaagtcgaggaagaggttgtacggttagaaaagacgaagaggaggcgagaaacgtcgtcgttgtcgtcgtcgtaggtcggtcggtttttcgagggcgttgttttcgcggttgtttataggcgttgagaggggtttcgggtcgcggtcgtcgtcgttttttatttttttcgtttgagttcggtttcgttttatagcggtttaatttttaaatttttattatggttgtagttttcgagaggagagaattgagcgtagtcgcgttttagcgtcgagcgcgtattttgtcgtagcgtataaagagtttcgttatattatcgttcgtcggtttgttcgtttttttcgtcgtcgcgtcgggagttcgggcgtttcggaagatcgaggggaggcgggaggcgagcgagaggcggacgggatcgcgtcgggcgaggggagggtagggtagggtagggggcggtaggagggggtagagcggtagttttgggtgcgagcgtagagtttttaagtcgtaggttttattgagtatgtttagtgtagttgtttggggtttgttcgggtcggtttttagtcgttagtttgtagttgtatttgttgcggtttttgtagtaacgcgaggcgaggataacgagttaagtttcggtttttgtttagaaatttagtcggaggtagggtaggttgttgtggggcgggggtggaggattgatgatgaaagttgagatgggtgcgttgagtagtgttattgattcgagtttgaggttatttgtgtataggtgaaaaggattaggtgattacgttgtttagtgtagagggaaatgtagggacggtttttgtaaggggaatattttttttttttgtttttatttttagattttcgcggcgtggattgtattcgttttttttttttgtatcgttgtcggattataatcgttcgtagagatttgattgtaatagtttttgtttagagattttttttttttttaaatttgtgtttttatggtgttagttttagtataaagagtaatttgttattgtgtcgttagcgtgtattattttattcggtttttttgtagcgttttatttttcgttttttcggtaattcggttcgtttgttttaaaaatgaaagtttttagtcgagcgtgttgaacgtgaatatatagtcgttgaattttaagggtttaaagggtatttatttaaatgaattgaaagaggatttttgtgagtgggacgtatttcgtaggttttttttgcgttcgtttcggtgtttttaagagagtcgagtattttttttttcgggttttaggtcggttcgcggcgtcggagttaagttcggtttttagagattatttagtttcgtttttttttggtcgtcgtgaaaattcggtaggatggatcgttcggggttaggtttcgcgcgtttcggtcggatcgtgtacgtttggggttatcgggttgagtggaaagtacggaacggtaggaagttgtagtttagcgagtgggcggggcgaggagatttaggagggtttaaaaggaggtggaaggatatacgggttatagtcggaattatttttcgaaggaggttacgtgtgtttttagttggggaattttttaaatttttattttttagtgatagtttcggaggtaagtcgttttttttttttgttcggggtgtttttgtttggtgtaggtagcggaattttaattttttttgcgtcgcggcggaaataggggttcggattagtttttcgaaggagcgttgtcggggttggcgtttggggaattggttatataagtatttatatttaaatacgtgttttcgttttttcgtttgttggttgtcgtcgatttttatagaacgcggggagagagtttttaaattggtgttatttttcgtttgttattttaagagtaagttaaaggattgagatttgagatttattttttgttttatatcgatttattttgcgtttttttaaacgtgggaaaaggagttgggcgttagggttttcgggtttttttatcgttgatgttttgtcgtttagggtgaatttttttggttttgtgtttgagggtattttttgttgtagtttagagcgtgtatttttcgatgttgtaataaacgtttagttattatttttgagttggtgagcgcgttttatttattgtggatttagttaagtgatttatttggtttgagaatttagttaatggtcgttagtttagaataaatttgttaagtttgtttatagtttcgattgggttgatttgttatcgtgagagagttgattcggaaatgttgagagttggatcgtatttttatttcgtattttattcgttaaggatttataaagtaagtagtcgattcgtttaaagagaatgagtattaatattagtttgggaatttattgtttttttattttttttaggaagtagaattatagacgataatttgagttaaaaaatatttaacgagatttaggttgaagtattgagttgttttttaaattttgagagaatgagaattaatttgtatgtgtgtttaataattgtaagtgtttagtaaagtttaaagagggtttatgttgtatttgagaaagagtattgtatatgtgtatattatagttgtaggtaatttttgaagattagaaattttaagagatttagcgtagaaagttataggttattatttaatttcgggattattaattaaatttgggatatttatagtgtttttagagatttttgaggttttataaaattttgtatttatatatagtatttaagatagttgtgtaggagttaataatttgttgaagttttagtgttgatatttattgaagattggttttgtgtatagttttggttagtttgggaaaggtaaggattatagtggaaaaggaaatggaaagtaatcggaaaagagtaagagaaaggtttttagttgatttttagagatgtagatattgtttatatagtttagcgtgaattatagattttattattgtataaataattaaagataaggagtttttgatgtttaggtgttttattagattgtatggtaaaaattagagttgtgtttaattattaattattgcgtggtagaaaaagggaaaatgaagatgaatttttaaaaggggagtagattagggaggggtaaaatgttttatatttgttttttagattgttgattttgtttttagagtttttgttattagtattgtttttttttgttttttttttggagtttattttaagtgataattagttttatagtatttgagaatttttgaaatttgtttttatggaagtaaatgaaataagggtgtatttttgttttggtgcgatagaatttttttggattttatggtatagagttattttggagtagagataatttgtattattagtattaaagtgttagaatatgagattagtttttaagtatttttattcggttgaagaaagaaaatgggaaatgggttttattgtttttttaaatattaggtttttttatttttttttagtggtgaatgaaaggattattaatgttggtagatatttggttagtttaatagtaatattaggtggttattaggagttggtgaataaaattttttttttgtttttagtgttaagttgtttttgaaagaaatattgatgtatttttttttaattttttgtttttttttttttttttatttaaatggttggttttatttaaattaaagaaagttttaaaaatagtatttttttaaagtttagttgaaaatatttgtttggttgtatagatattataatatattggtttttaagtattttagttttttttttttttttttttttttttttttttttttgagacggagttttataggttggagtgtagtggtatgatttcggtttattgtaatttttgttttttaggtttaagtaatttttttgttttagtttttcgagtagttgggattataggcgtatattattatgtcgggttaattttttgtagtttagtaaagatagggttttattatgttggttaggatggtttcgattttttgatttcgtgatttgttcgttacggttttttaaagtgttgggattataggcgtgagttatcgcgttcggttatatttagttttttatttgtttggatttagaattagaatattatagggagaagtagaagtttgtaataaagggataattatataaagttttagggtgattatgtagattgattagtaagtatggtaaattagttttaattatcgtttttaatagttgattttaaaattttattgttattatattaaaataatgtcgaaagaaaattttttttttattttttttgataagcgaaatgattagtaatttgatgtggatgatataaatatttgatgtgttttttgtaggttatttgttaagatgttttttgtgtaaatattttgatttttatagtgttttttttattttttatacgttgattttttaaaaagggatttaatttaatagttttaatttttaaataattttttgtatttttgtttgtttaattattgttttttaaataatatagaatataaaaatataataattattggattgaatgtaaatttattgttttaagggtttgaggttttttttttattttatttattttaataataaatattattgtttttttaataaagataattttaagatattttttaaaaggcgttattgtgggttatataagtaattatattttaaaagagaattttttattattgtttataagttttttatgttttaaattttttttgaagttattttagatgttatggtgttattttttatattttggtagagagatgtgttgtatgaaattattatttttagagaaataagggttgagttggttgtttttgagaataatagagtagattaggtatttattgtgtttaagtggcgtttagaaattttgttttggatcgtggagtaatataaataaaaaagatataatatgataagatagttttgattatgttagtttttaggttaatattagttattaattattttatttggtttttttaatattaattttagttatatggagtatattgtttgttttttagattttttaataatagaaaaaggtaatttttatatattagaaaatattgggatatttattaggtgttttatagagtaggtcgaaattttttttttttttttttttttttttttttttttttttgagacggagtttttttttgttttttaggttggagtgtagtgacgtgattatggtttattgtaatttttgtagaatagttcgaatttgtttaggtagagggatattgagaaggagttaaaattttgttttgtttaatttttataatttttttttttaaaatatttttttggtttttaaggtattataaaaaata

SEQ ID NO: 211 - DNA, 6478 bp, Artificial Sequence
  chemically treated genomic DNA (Homo sapiens)
tttattttgaagggatgtttaagaaatattgttaaatttaaaagtgttgtagagtaatatgtattataagattatattggtataatagtaataaatagtatttttttatataattttaaaaaaatatatagatttatgttaagtattagttaagatgtttggtatatggtaggtatttaatatttaatgaatatatgtagaggatttttattttttattttatattttttggataagattttgaatttttatgagtatgtattatttaaatttagatttatagggagtgatggaaaatgtgaaaataaaattttaaaaaggaaaagaaagagtaaagatttagatttaaaaaaggaaatgtaaataagatgaaatagttaaagataggtttttttaaaattaatgttgagataatgttattagtagtgatagttagttaagagatggttcgtagtttattgtttagtattgaggtatttagtaggggttgtatttaatttttaagttggaattaatcgaaattgttgggtttgaagagttgtttttatgagttatcgacggtagaaagtatagaagtattaaagaaaataatttagaaatgtggaaagagaaaagtatgtttttgttttgggagaataatatttgtgtgtaattaagtaggaagattttgtggaggaaagtttgaaaaagtagagagttgaagagaaaagagttaaatgaaggatacggtggttaatatttaaagtaaaaagatatttttgaagaagatgtgtttttagggtttttaagaagtcgttatatttatgtttagagttattttgtaagtttatttggaaagtgtattggtgttttttggtataagatttacgaatattaatagttttgttatgtgagtaggtgtttatattgaagggttataagtaaagtttttatgtgttattattgttagaatttttttcgtttttttttaatataaaagtagttttgtttgttagtatggaagttttgggaagagttttatatttgtttcgtgttgttaatatttttgttttggtttttttgttggaatatataagttatttagtattagttatttatttttttggtagaattgtggtaagaggggattaatagggaaaaaaaattaaaaaataaataaaaagttaaaataatatgaaagagttgggtatgtttttaaaataattagtgtttattttttttagttttgtgtttgtgtttgtttgtattttgtatgtttgtttttgtggtggggggggatatgtttgcgtttttgaaaatttttttatttagatattataaggtattagtttaattttgaatatagtcggttgtagtacggtgtatagatacgattgttttttttttagaaaattttttagtttaaatatgtttgtagagtatgatttatggtgtttttttttggattgtttagtgggtaattgttgtacgaaaattagagaaatagatgtagattttgaattttggttataaatttttgttttatgattatgggttttaaatgtgttgtgttatattgataaatatatagttattttgaaataaaatggattttatttttaaagttttgttttttgttttttattttttgtttgtttgttggttggaaatatatttattagattattgattaaatataaagaaaatagagatgatatatattagaatgttattttatgttataataagaagatatttgggaaagttttttttaattttgtggttaatgtttaaaatgggtgttagtagtttatattttattacggataaatcggtttattttttattttttattttatttattaatttttatagtgtacggatttgtatttaaagaattatggtttatttatgtattttttttttattttatttaaaatgaagaatttggagatagaattaagtttttaagaagtgtaagtatttattgatgaagaaataattagtatgtggttaaattatgggtttgttttataaattaatatttggattaagtaatagttttaattattgttattagtataattaatttatgatgaggaatgattaattgattagcgaatattgttatattataagaaatttatattattttttttatggggatttaaatattgattatttattttaaggtttaagtttattttttagttgagaattttaaggtaattatatattttatatttttttgtataaagaaagaaaatatcgagtcgtttaatttttattatatatagagagagatatattaatgttgttatttttgtgtaatgatatagtatagaggtaagaaattcggaagtagtggtttcgtttaatgaggttgattttatagtttaagaaatgagaatgaatagaattttgaggatatttatttttatttttatttttttgggattagtgtatttttattttttggagagatgttaagtaagaatgtgtagtagttttttttggataatagatttttgtatatatatatttgttagtgatgttatgttttttatttttaatttaagttttttttgttttatttttaatatagttgttttttttttttttgtttaataattttttatttatttttattgttcggtaaaaatgaatttagtttttaaggaattttaaggattttaaataagtatttggagttataagttttatggattaagtagaaattggtatataatgtagtgttttgtgtatttttataattattttaatgatagtgtgttaaatgttttgtaaatttttttgtgtttttttgtttaaaatgtgtgttttttttgtagttaaagggttttttataataagtttttgttataaaatgatggttatataaaagagagaagagaggcgtaaaaataataaatatagatttagtaaaaattttatttttttattgttttgaattttttaatagtaagaattgagtttgttgggttgaaaattgttttaatgtatttttataaaaggatttttgatttggtaagtgtgtgcgatgtatattttttatgttatattataagtgttatttagtaattttattagatagggtagtgttttagtatggggtggggtgttttttgataggtttttaaaaggttcggatgttaatgtatattttaatattatttataaaaaggagattggagtagtgtttttttttgtattgggtaaggagattttttttttttgtttaattatttgtttgttttgttttgtgggagaattataagtaaatgttatagaggtagtggagaaaaaagggtgttttaatttttttttagagttttttttatttgatgtatgttgtattttttaaataagttgtgtaaaatggttgtagggtagattggtttttttttttaaagttttttattcggttgggtttatttgtaaatattgtatttattttttttagtgttttaggattggttggaaagatttttttttttgtaggttgggttagtgtgagagatttaaaaaattatttttttttaaaattattgtattttaataaaaggattgggtaggggttggaatgagagaaaattggttttttaaaatgtaaaattgttatatttaaattagtttataaaatatgcgtttaattatgtggtgggatgtgtgtaggtgtatgatgagagaggtaattaatatggttatttggggtgtaaggatgtgggaataggtaagtaatttttatattggatttttattttagggagttgggttttagttatagttttgagttgtgtgattttgggtaggttttattttttcggggttttgttttattagttgaatagtatgaggatgagttatagttaatatttgttttatgatatttatttagtattatataagtgttatttttgtttttttagttaatattgacgtgggtagtattatatgtttattttatagatgaggaaattgaagtttgaagaagttaaatatttattttagaatatatagttggtaagtggtagatttggaattggaatttagtttagtttgattttttaatttatgtttttgattattatattgtttttttaagtttagatttgaaattttattttttgtgtggttgtgtgtttgggataggggtaattaatttttgattattttatatgttgtatagaatttggagaggattttttaaagtaaatgaatttcgaaagttggattgtagagtaaacgagtgtagttaatttagttaggggtttgtaagagggagaaagagaaaaagattgtggaatggaaagttttttaatttaagttttttttaaggggtagttattttttgttttatagtttagggtttgtatgtgttttttttggagtggaaaaatatataagttataaggaatttaatagatagaaaggcgtatagaggaatttaaagtgtgggttggggggcgaggcggtgggcgggaggcgagcgggcgtaggcggaatatcgttttttaagttaagtcgtcgtaaataaaaaggcgtaaagggagagaagttggtgtttaacgtgagttaggagtagcgtttcggttttttttttgtttattttaaaagtattttttgtattgtttttaaggtgagaaataggaaagaaaacgtcggtttgtgcgttcgttgtttgtttttttggttgtttgtttttgtagggttgttgggagtttttaagttttgtgagaattttgggagttggtgatgttagattagttgggttatttgaaggttagtagttcgggtagggtttatcgaaagtttattcgtatatattaggtaatttaattttttattttgtgtgatagaagtagtaggaagtgagttgtttagaggtaggagggtttattttttgttaaaggggggattagaatttttttatgcgagttgtttgaggattgggatgtcgagaacgcgagcgattcgagtagggtttgtttgggtatcgtcggggtaggattcggaacgtattcggaaggttttttgtaagtatttatttggaaggagaatttgggatttttttgggaatttttcgtttcggttggattggtcgagtaagtttggaaaatggtaaatgattatttggattaattataggtttttagttggtttgtttgttataatttatgattcggggttgggaaaaagattaatagtttacgtgttaaaaaaggggtagagtttgatggagttgggtggatttttttatgttatttgtttttatatttagaggataagtatttttgtagatatttagtgtaagggagattatgtttgattgtatggatgttttgttagtgagttttgggtaaattttggatttttatattgcgagttcgtttttttgtatgttttaggagaaagtttttaaagtatgttttagtggattgatttaaatcgaatggtagtatcggtatattgtttaatgtaggtttatttttttttttttttttattaagaaaaaaaaaattgttttttttgtatgtaataaagacgttggaaataaattgtattggtagtaagataaaggatttaatgatttaatgttgaaggggtgtgatatgttggtatgtatattgattttttttgttgaaaattttttgttagatgttttttttttaaataatttttttcgtttttatgtttttttttttattaattttatagttttttgaaaatagtttttaaaatatgtataaaaatgtggggggtggggagtagagggtgattataagattttaaaatattttttaagtagggtaatttgatatattttgtagtttttattaaaatgtatgtagagtggaatttaattttgttgttttttggattagttattagttgtataggtttttttattttttgtgtattttaatagtttaaagtaattaaaatatgatattttttttgaaaggaatttagtttaattaaggtggttgttgttttcgaagtttataaattattagtttaagttgtcgtttttaatgttttttttgttaaggaaaggtaatattttttagtattgattttgttgttatttttttaagttattttgttggtttaagaagttgttgttttgttagaaaattattggtaatgaatattttttggattgagttatttattatttttatattttgtagtttagttcggaacgtggatattagttaaaggaaaggaaatataagtggggtagtttaatttaaaaaaaaaatattgattattttgttatttgatgttgatatagtgtcgaggtacgtatttggttaatagtagtttggttgtaggtttgagaaatgattaggagttttagaaaattttattttcgggtggttgtagtgggagtttgtaggatgtttcgtcgttttgatagtgatttagataaatggtttagttatttattaaaatgtttttagtattttatttg

SEQ ID NO: 212 - DNA, 6478 bp, Artificial Sequence
  chemically treated genomic DNA (Homo sapiens)
taaataaagtattaaaaatattttgatagatagttgagttatttatttaaattattgttagggcggcgaagtattttgtaggtttttattatagttattcgaaggtgggattttttgggatttttgattattttttaagtttgtagttaggttattgttgattaggtgcgtatttcggtattgtgttagtattagataataaaatagttaatattttttttttaaattgggttattttatttatatttttttttttttaattgatgtttacgtttcgggttgaattgtaagatatggaaataatggatggtttagtttaaggggtgtttattgttagtagttttttagtaaaatagtaattttttagattaataaagtgatttggaaaggtggtagtagggttaatgttaagaaatattgtttttttttagtaaggaaaatattggaagcggtagtttgaattggtggtttatgaatttcgggagtagtagttattttaattaaattaaattttttttaaggaaaatgttatattttaattattttggattgttggaatatataaggggtggggggatttatataattagtagttaatttaaagaatagtaaagttaaattttattttgtatatattttagtaaaaattgtaaaatgtgttaaattgttttatttgaagaatgttttaaagttttgtggttattttttattttttattttttatatttttatgtatattttaaaaattgtttttaagagattataaggttggtaaggagaggagtatgggggcgggaggggttatttgggaagaaaatatttaataggaaatttttagtaaagggaattaatatgtatgttagtatattatatttttttagtattaaattattaaattttttgttttgttattaatgtagtttatttttaacgtttttattgtatgtaagagagataatttttttttttttggtagaagaagggaaaaaaataaatttatattgagtagtgtgtcgatgttgttattcggtttgggttaatttattgaagtatgttttgagagtttttttttggagtatgtaggaagacggattcgtagtgtagaaatttaggatttgtttaggatttattgatagaatatttatatagttaaatatgattttttttgtattgaatgtttgtaaaagtgtttattttttaggtgtggaggtaaatggtatagaaaagtttatttaattttattaaattttgttttttttttggtacgtaggttgttggttttttttttagtttcgaattatgaattatgatagataagttagttaaaagtttgtaattgatttaaatgattatttattattttttaggtttgttcggttaatttagtcggggcggggggtttttagaaagattttaagttttttttttaagtaaatgtttgtaaaaagtttttcgaatgcgtttcggattttatttcgacggtgtttagataaattttgttcggatcgttcgcgttttcggtattttagtttttaaatagttcgtatgggggaattttggttttttttttggtaaagaatagatttttttgtttttgaatagtttattttttattatttttgttatatagaatgaaagattgaattgtttaatatatgcgagtgaattttcggtgaattttattcgggttgttaatttttaaatgatttaattagtttgatattattaatttttaggatttttatagagtttaaaaatttttagtagttttgtaaaagtagatagttagagaggtaggtagcgagcgtataagtcggcgtttttttttttattttttattttaaaaataatataagaagtgtttttaaaatgagtaggggaggagtcgggacgttgtttttggtttacgttgagtattaatttttttttttttacgtttttttatttgcggcggtttagtttggaaaacggtgtttcgtttgcgttcgttcgtttttcgtttatcgtttcgttttttagtttatattttaaatttttttgtgcgtttttttgtttgttaaattttttataatttatgtatttttttattttagaaaaagtatatgtaagttttaaattgtagaatagagaatggttattttttgggaaaggtttgggttgggaaattttttattttatagttttttttttttttttttttttgtaagtttttggttgaattgattgtattcgtttgttttgtaatttagttttcgagatttatttattttgaaaaattttttttaggttttatgtagtatatagagtagttaggaattggttatttttgttttaaatatatagttatatagaaaatgagattttagatttggatttgaaaaaatagtatagtggttaagagtatgggttggggaattaaattgaattagattttaattttaggtttgttatttattagttgtgtgttttgggataagtatttaatttttttaggttttagtttttttatttgtaaaatgggtatataatattatttacgttagtgttaattgggaggatagaaataatatttgtatggtgttgggtaaatattatggaataaatgttagttgtgatttatttttatattgtttaattggtgaaataaaatttcggggagatgagatttatttaaggttatatagtttagagttgtgattagaatttagttttttaggatgaaagtttaatgtgaaaattatttgtttgtttttatatttttgtattttaaatagttatgttggttgttttttttattatatatttatatatattttattatataattaaacgtatattttgtaaattggtttaagtatgatagttttatattttgaaggattagtttttttttattttagtttttgtttaatttttttattaaaatatagtaattttaagggaaaatgattttttagattttttatattgatttaatttataggaagaagagtttttttagttagttttaaaatattaagaaggatagatgtagtatttataaataaatttagtcggatggagagttttaaaagggagagttaatttattttgtagttattttgtataatttgtttaaaggatgtaatatatattaaataaaggaaattttggagaggaattaaaatatttttttttttttattgtttttgtagtatttatttgtaatttttttataaaatagggtaggtaagtggttaggtagggagggagagtttttttgtttaatgtagggaagagtattgttttagttttttttttgtggatagtgttggaatgtgtattggtattcgggttttttaaaagtttgttagggggtattttattttatgttgaaatattgttttgtttagtggagttgttaagtggtatttgtggtgtaatatgaaaagtatgtatcgtatatatttattaagttaaagatttttttatgaaggtatattaaaataatttttagtttagtaagtttagtttttgttattgaaaagtttagggtaataaaggggtgagatttttgttgaatttgtgtttgttatttttgcgtttttttttttttttttatatggttattattttgtaatagagatttattgtaagaaattttttaattataaagaaaatatatattttaagtaagagaatatagaggaatttataaaatatttaatatattgttattaaggtagttgtaaagatatataaagtattatattatgtgttaatttttatttggtttatgaggtttatggttttaaatgtttatttaaggtttttagagttttttggaaattgagtttatttttatcggatagtggaggtggatgaaaagttgttagataagagaagaggaaatagttatattggaagtagagtaggagaaatttaagttagagatgagaaatatggtattattgataggtatgtgtgtatagggatttgttatttaggggaggttgttgtatatttttgtttaatatttttttaaagagtagagatgtattggttttagggaagtgaagatggggatgggtgtttttaaaattttgtttatttttattttttaagttatggaattagttttattgagcgagattattgttttcgaattttttatttttatattgtattattgtataaaaataataatattagtgtgtttttttttgtgtgtggtaaaggttgggcgattcgatgttttttttttttgtgtaagaaaatgtaaaatatataattattttgaagtttttaattgagaaatgaatttgggttttgaaatgaataattagtatttaaatttttatgaaaggaatagtatgggttttttataatatgataatattcgttagttaattaattattttttattatgaattaattatgttgatagtaataattagagttattatttaatttaagtattaatttataaaatagatttatgatttagttatatgttaattatttttttattagtaaatgtttatattttttgaaaatttgattttgtttttaaattttttattttaagtaaaatgaaggaaagatatataaataagttataattttttaaatatagattcgtgtattataaagattaatgagtagggtagaaagtgaaaaatagatcgatttgttcgtaatgaaatgtaaattattgatatttattttaaatattagttatagggttggaagaaatttttttaaatatttttttgttatggtataaaataatattttgatatgtgttatttttattttttttgtgtttgattaatgatttaataaatgtatttttaattaataagtaaataaaaagtgaaaaataaaaagtaaaattttgagagtaaaatttattttgttttagagtaattgtatatttgttagtgtgatatagtatatttgaaatttataattataaaataaaaatttatagttagggtttagggtttatatttgtttttttggttttcgtatagtaattatttattggataatttagaaagaaatattatgaattatgttttgtaaatatgtttgaattggagagttttttgaagaaagagtagtcgtgtttgtgtatcgtattgtagtcggttgtgtttaaaattgggttaatattttgtgatgtttaaataagaagatttttagaggcgtagatatatttttttttattataggggtagatatgtaaagtgtaggtagatataggtatagggttgggggaggtggatattgattgttttaaagatatgtttagtttttttatgttgttttggttttttgtttgttttttaattttttttttttgttaatttttttttgttatagttttgttagaagaataaatggttagtattgagtgatttgtgtgttttagtagggaagttaaggtagagatgttggtagtacgaggtaagtatgaggttttttttagggtttttatattagtaggtagagttgtttttgtgttggaagggagcgggggaagttttaatagtaataatatatggaaattttgtttgtggttttttagtatgaatatttgtttatataataggattgttgatgttcgtggattttatattaaaagatattaatgtattttttaaatgaatttgtaaggtggttttgggtatgagtatagcgattttttagaaattttagaaatatattttttttaaaaatgtttttttattttgagtgttggttatcgtgttttttatttggtttttttttttttagttttttgtttttttagatttttttttataaagtttttttatttggttatatataaatattgtttttttaagataagggtatatttttttttttttatatttttgaattattttttttagtgtttttgtgttttttgtcgtcgatgatttataaagatagttttttaagtttaatagtttcggttggttttaatttgaaagttaaatataatttttgttgaatgttttagtattgagtagtgagttgcgaattattttttagttgattgttattgttggtggtattgttttaatattagttttggggagatttatttttggttattttattttgtttatatttttttttttaaatttagatttttattttttttttttttttttaaaattttatttttatattttttattattttttataaatttagatttaagtaatatatgtttataaaaatttaaagttttgtttaaaagatataaagtgaaaagtaaaagttttttatatgtatttattaaatgttgaatatttattatgtgttaggtattttaattggtgtttggtatagatttgtatatttttttgggattgtgtgggggggtgttgtttgttgttattatattagtatggttttatgatatatattgttttgtaatatttttaaatttagtaatattttttgaatatttttttaaaataaa

SEQ ID NO: 213 - DNA, 2534 bp, Artificial Sequence
  chemically treated genomic DNA (Homo sapiens)
aggtaggaaagtgggatagtcggggagttggattttattttttgtgagtttcgttggtatttgatggtatgtggtttggagagggtaggtgatttggcgtggagggttagagggtaaatttttaaataagtggtaataggttattaatttgaaagggaaaattgtgtagtgatgggaaatgtgtttaataaatttattgggtgattaattataaaggttgggttggagttttagaggttgtttgttaaatattttattaagcggtattttgaaagttgttatttgcgtattttgggagtttagaggggattttgagggggaatgaggtttggaggatggaattatttttaggtagattgagaaggagtttggattttatttttaaatatagtttggagtttataggttagaggttttaatgggagaaaagttaaaggaagagggtgtagaaaggagttttagggaattggtggttatgtgattttgagtaaattttatttttttttgagatttagtgtttttatttttatggttttgtgtgtgttatagagatatggtggggattaaattcgatcgtgatatgaaagtgtttgggaaattttatggttttatttaaatatgagttatttttatttgaattaaggggggaagttatttggtaggattaggaattttatttttttgaatttttatgggttttgtcgaggttgaagtagttaggggttaaagttagtttttagtttttggaagggtattgtgaaagtggatttgatttgagaagtcgttttttgatgtgggtagttatgtgatgttagtttcgaataagagggggtagtttggagtttggaaaggtgttagtgtaggtggggtttacgtttagattttttttgttgattgttttgatgatttatttttatattttagtttttttatttttattgtagagtcggaaagggtgtggggaagagaggagagggaggtaggttttgggttttggtttcgttttttgtttttttttatttttttttgggtttggttatttagttaaaaggtaggttaagagtaggagagatatagagttcggtattggttttaggtagtagttagttcgtcgttcgtttgtgtgtttttagagttatggagagagttagtttgatttagaaggttaagttggtagagtaggtcgaacgttatgaggatatggtagtttttatgaaaggcgtcgtggagaagggcgaggagtttttttgcgaagagcgaaatttgtttttagtagtttataagaacgtggtgggcggttagagggttgtttggagggtgttgtttagtattgagtagaaaagtaacgaggagggttcggaggagaaggggttcgaggtgcgtgagtatcgggagaaggtggagattgagttttagggcgtgtgcgatatcgtgttgggtttgttggatagttattttattaaggaggtcggggacgtcgagagtcgggttttttatttgaagatgaagggtgattattatcgttatttggtcgaggtggttatcggtgacgataagaagcgtattattgatttagttcggttagtttattaggaggttatggatattagtaagaaggagatgtcgtttattaattttattcgtttgggtttggttttgaattttttcgttttttattacgagatcgttaatagtttcgaggaggttatttttttggttaagattattttcgacgaggttatggttgatttgtatatttttagcgaggatttttataaagatagtatttttattatgtagttgttgcgagataatttgatattgtggacggtcgataacgtcggggaagaggggggcgaggttttttaggagttttagagttgagtgttgttcgttatcgtttcgttttgttttttttagttttttattttgtcgagaggattagtatggggtgggaggttttattttttttttttaggcgttgtttttgttttaaagggtttcgtggagagggattggtagagttgaggttatttggggttggggattttattttttttgtagttgttgagcgtatttaattattggttatgtttttatttttgtttttcgtattcgttttttttcgattttaggattaggttattttttttttttttttgttttttttttgtttttgttgtttttgatcgtaggaattgaggagtgtttcgttttgtggttgagaattggatagtggtaggggttggagatgggtgtgtgtgtgtgtgtgtgtgtgtgtgtgtgcgcgcgcgttagtgtaagatcgagattgagggaaagtatgtttgttgggtgtgattatgtttttttttaataaagtttttttgtgatattttttttgttttttttttagtttttggcgatgggttgggagtgggattggaatttgatttagagattttgattttggatttttgagttagggttttgaattttttaggtggtttagtggttcgtacgtaagattttgagtttaggtgaggtcggggttt

SEQ ID NO: 214 - DNA, 2534 bp, Artificial Sequence
  chemically treated genomic DNA (Homo sapiens)
ggatttcggttttatttggatttaaagttttgcgtgcgggttattgagttatttagggagtttagggttttaatttagaggtttaaagttagggtttttaagttagattttagttttatttttagtttatcgttaagaattggaagagagataggaggagtgttataggggaattttattgagaggaaatatggttatatttagtagatatgtttttttttagtttcggttttgtattggcgcgcgcgtatatatatatatatatatatatatatatatttatttttagtttttgttattgtttagtttttagttataaggcgggatattttttaatttttacgattagaggtagtaggggtaggagggaggtaagaggaggggagaagtagtttggttttggggtcgggaggaagcgggtgcggagagtaggggtgggggtatgattagtggttaggtgcgtttaatagttgtaagaagagtgggatttttagttttaggtggttttagttttgttagtttttttttacggagttttttggagtaagaatagcgtttaggggagaagggtggggttttttattttatattagttttttcggtagggtgggggattggagggggtagggcggggcggtggcgggtaatatttagttttggggtttttggggagtttcgtttttttttttttcggcgttgtcggtcgtttatagtgttaggttgtttcgtagtagttgtatgatgagggtgttgtttttgtaggagttttcgttgagggtgtgtagattagttatggtttcgtcgaaagtggttttggttagagagatggttttttcggggttgttggcgatttcgtagtggaagacggaaaagtttagggttaggtttaggcggatggggttggtgggcggtattttttttttgttgatgtttatggttttttggtaggttgatcgggttgagttaatgatgcgttttttgtcgttatcggtggttatttcggttaggtagcggtagtagttattttttatttttaggtagaagattcggttttcggcgttttcggtttttttgatgaggtggttgtttagtaggtttagtacggtgtcgtatacgttttggagtttagtttttattttttttcggtatttacgtatttcgggttttttttttttcgagtttttttcgttgtttttttgtttaatattggatagtattttttaggtagttttttggtcgtttattacgtttttataggttattgagagtaggtttcgtttttcgtaggagagtttttcgtttttttttacggcgttttttatgaaggttgttatgtttttatagcgttcggtttgttttgttagtttggttttttggattagattggttttttttatggttttggggatatataggcgggcggcgggttaattgttgtttgggattaatgtcggattttgtgttttttttgtttttggtttgttttttggttgggtggttaggtttagagaagggtggggaggagtagggggcgggattagggtttaagatttgtttttttttttttttttttttatatttttttcggttttgtagtaaaggtaaaaaggttgggatgtgggggtgaattattagaatagttagtaggagaaatttgggcgtgggttttatttgtattggtatttttttaggttttaggttgtttttttttgttcggggttggtattatatggttgtttatattaggaaacggttttttaaattagatttatttttatagtgtttttttaggggttaaggattggttttagtttttggttgttttagtttcgatagagtttataaaggtttaggaggatggggtttttaattttgttaggtaatttttttttttggtttaggtgaggataatttatgtttaggtagggttatggagttttttaagtatttttatattacgatcgaatttaatttttattatgtttttgtgatatatataggattatagagatgggaatattaagttttagagaggggtgagatttgtttaaagttatatagttattaattttttgaaatttttttttgtattttttttttttagttttttttttattgaggtttttgatttatgagttttagattgtgtttggaagtgagatttaggtttttttttagtttatttgaagatggttttattttttaggttttatttttttttagggttttttttgagtttttagaatgcgtaggtggtagtttttagagtgtcgtttaatgaagtgtttaataagtagtttttgaagttttagtttagtttttgtaattagttatttagtaggtttgttggatatattttttattattatataatttttttttttaagttggtggtttgttgttatttgtttgaggatttattttttggttttttacgttaggttatttgttttttttaagttatatgttattaggtattagcggggtttatagagggtggggtttagtttttcggttgttttatttttttgttt

SEQ ID NO: 215 - DNA, 6558 bp, Artificial Sequence
  chemically treated genomic DNA (Homo sapiens)
taagattataaattgttttttattagtggggaaggttttaaatattatgtatttagtataagtaggtgtaattaatcgtaacggtttgttttgttattttcgattaatatataattattaggttagaattgtattttataagttttttgcgtttagttattttgtatatattaatttttttaagttttgtgttttaaaagaattgtatagtgttgggaagttttttatttattttaatttttagggtatcgagttcgaattcgaattaggtattaggtatgttttattattataaaagatgtaaaaagatgcgtatagtggcgtatatttatagttttagttattgaggaggttaatgtgggaggattatatgaggttgtagtgagttgtgatggtgttattgtattttagttttggcgatagtgagtttatgttttaaataagtaagtaaataaaaattaaaaagaatttagtttatagggtatttgaaggtaagaggaaaagatgttagaattagagatggggagaagatgggtttttggcgtttgttgaggttgagaaatgagatagataggttgagtgtggggtggagagaggatgggtagagagattgaggttggtttgaatggaaatgaaatgttagggtttttagggttatcggggaataattggagtttttaggaaaggtttaacgttgtgattatttgtgttcgttatgtttttttattttttattaattgtgtgaatttggtagattttgagttttagtgtttttttttgtgaagtggggttattttattttaatttttgggattgttgtgtgaattaaatggggtaatgtacggagagtatttgacgtatagcgagtgttttaaaattttagtttgtattttttagtaaaggatatgtatacgtttattgtgagtgataaatttaggatgatttgaatttaatgtgataacgtgggttttcgtatgttggttatgttgtcgggagatatttatggatttaattagtataataggggaaataaattatttaatgtattttgttaagatagaatattttagaatttattttgtggggcggggtataataaagggggtttttttgttgaaaacgtttaagtttaggttcgtggtattatttaattaaggtcgatagttatatagtaagttagaggtaatgttaggatttaaattaaatttgtggtttttataatgaggttattttttttttttttgaacggtttggggaaagggggtgggtgggtagaatttggtagtggttaattttttatttttgttttttggtttttttttgtttttatttttaggtttgtattgattgattgattgagatagggttttgttttgtcgtttaggttggagtgtagtggtacgattatggtttattgtagttttaaatttttaggtttaagtggttttttcgttttttatttttcgagtatttatatttttaggtttttaaaatggtttttaggtatttggttgtcgttttagatatttatttgggtttttgggtagggattgttcgggaaattttatttatgtgaagtaggtgtgggtgtaggaaggtcgtttggaaatgaattagtattgttttttgtttgagtcgtaagtagggcgttagagggtttggcggataagaaagggaggatgataggaggtcggtattgtaatgatacgttttagttattagagggtacgaagtagttgggtaaaatttcgcggggtcgttggtggaaaatttttggtatttggagttcggagatggggtggacggaatgtgaggatttagttttttgaggttgggtcggggtagagttattgttttggatgttcgtagggtttgtttgtgttttgattattttgtttttgtagatagttggagaatgtgagagtgggattgggatcggattttaggggttatttcgtataatttttttgttttgtcgtgggggagggagttgtttaaggttacgtagtaagttagtggtaaatgaatacgattattattagttttaggtatatggttatttgatgggcgtagtcgtagttttagtttttgagatagagatatttgattaaggataggtttttaggagttgattttagtgattcgcggttttgttgttgtttttgtttttttttttggtttttttatttgattgattttttgtttttttcgtttgtttgtttgttttcgtttttgttcgttggggggtttgtttaatttttttattgggttttgggagtcgtagttttttgttgttattttttagggatttgtagttttttgaagttttttttcgattcgttgtttcggttttatttttgggatttagaggagaggtgattatttcgtagtatagttagtggtgtgattttacggggtgagaaggatttttttgtttttaagtatttttttagtgatttttgttgttatgtggtagtcgtaagtattggttggtatttggtgtgggcgagatttttattttatgtagaaatgagtaagatcggtgagtttattatgtgggggtgaggttgagagaaaataagtatataggtgatttagttaaaattagaattttttaagtatatacgaaaagggtaaaaggggcgttttgtataggatagaataggtagatattgaattcggttgggttttgggaaggttttttgtagtggtttttgaagggggggttggattttagtaggatagagggtatgggtatgtgtgggtacgttttgaatagaggggttagcgtaagtcgagggttttggttatattagttgtatgtgtcggtgtgtttaagggatacgtagtagtaggtcgagtttggagcgttttattgttaggttttttaaaaatttttaattttaatttaattttattttatttttattttaagttttggtatatatgtgtagaatgtggtttgttatataggtatatatgtgttatggtggtttgttgtatttattaatttattatttaggttttaagtttcgtatgtattaggtattagttttaatgttttttttttttttgtttttattttttttttcgtaattgtttataggttttggtatgtggtgtttttttttttgtgtttatatgtttttattgtttaatttttatttatgagtgagaatatatcgtttggttttaagggatagttatggggatgtattgtagtttttgagtagggaaggttttgtggaggtttttagttaaaaggaaagaatggttgtgaaaatcgatgtattgcgtttttttgttttttatttttagtgtgaagggtttttatttcgagttttatttgaagtaggtttcgatgggaagataagtagtatgaggggtttaagtattgaggggagtaagggatattcggtggttgtgttaaggtgtagaagaggatattgggggttttaaggtttgattttatgtatattgtttaggttggtttttaagttatacggtgatcgttaggaagggattagtttgtttttagtttgatttttttgttatgttattatttaaagttttttttggtagggtttgtttggggtttttgtgttagtgttttttttgttaggttgggttggggtttttatttattgttttgggattgttgttgttttggttttgggggaggagggtgtgtcgttgagttattgtttgggtatttgggtttggaatttcgggtgagttatttagggttgaggtagaggggttgggggaggggaagaagttattcgatagttggagtagggaggggagttggggttataggaagggcggtgttttgatgtttagacgggtcgggatagataaagggttaaggaggaaggggttttgggagggggtagtttttttttgggttgggttttgaatggttatagtgtttgttttttttcgggtttggggaggatatgtgtgtggggggtagtgagagagggttgtggttgagggttgtgttttaggtttggattttggtttgggaagttgtttagttggtgtttttagttttgggtagggatgtatttttatttatttatttagtttttaagttggagaagaggaggttaaagtttttttgtttagtttttaattattcgggatttttttatgttttttatagattgtggtttagtttaattgcggttgtgtgtagagtaattttattttttattgtttttttatttttttagatatttttttatatagagggatttttttaggtatttttaagtatatttagttattttattattttattaagaggtattttggtgttggttattaaaagttattttattttatttatgttttgaagttagttttgtttttttttttttgatgttttttagttgttttttttggtttttagttttttaagggtggttttaggttgttttttttttatatatataggcgtatgtatgtatacgagtattggattatgaagttttagcgtgtgtttatagttttttatataggagtgggttgtgatttataggtatgttatgagaatgaggtttggtattagtttttaggttttagagtaggggttgtttttttttatttcggtttaggatgtttagtttttacgatattttttattttttattgtggtttgggtgggtttaggggttgtttttgatttggtttagagtttttttttagttggtggtggagttggtattttttgggagggagggggttgggagggaatgagtgggaatggtaagaggttagggtttggtgggattaggttgaggtaggtttggtttttttaaaatgttaagttgggggttagtggggtttatatataaatttttattttgggagtttggttgttttgtttttttttttgggtttgtttttgttatttggtttggtgagtatttttgttttgttgagggtagggtggggaggattttcgtgggtttttgtttttgtttttatagtttttttattttagtttttttggtgggattaatttgggtttttttgggtttttttttttggaagaattttttgtgaagtgttgaagtgttgattgaagggttttttttttttttttttttttttgagatggagtttcgttttgtcgtttaggttggagtatagtggtgtgattttagtttattgtaaatttttttttttaggtttacgttatttttttgttttagtttttcgagtagttgggattgtaggcgtttattattatgttcggttaatttttttgtatttttagtagagatggggttttattatgttagttaggatggtttcgattttttgatttcgtgatttatttatttcggttttttaaagtgttgggattataggagtaagttatcgcgttcggtcgattgaagggtttttttttaggtttttttgtgaggttttagtgtaggggttgttttgaggtttttttttggatattttagtttaggggtttttttttgggggtttaggtttaggagtaggaggtgtgtatgtgggcgttgttgtaaaaagaattttgagatttttttttttttttttttttttttttgtaaagttttggattttagtaggattaaggtgtaagaggtaggggttttaagattttgtttgggttatggttttaagtagtaaagttttgttttttgtttcggtgaaggtagggttggtatgatgggtttagggtatgttttgtttttggtatagtttttttggttttattttgaaatttgtttaatttttttaggttggtttgagtatttttagaggttttgtcgttgaggtttgttttattttgattttaaggtaatgaatattttatatttttaattttaattttaataggattttttttggtggagagaatgttaagttgtttttattttatttatgtttttgtttgtttagaggtttaggggtttttagggtgaggggagatatattttttattttttgggagtttttagtttgagagaggaaatatttttgtttaagggagtttttagttagatggtagagagagatgtttttggttttaggagtttcgagtttaaggagggaaacgatttttttagggagttttttgtttttaggttgtagttatggtttttgttagattgtataggagtttttatttgttagtcggtgtatgtggttttgttttttagagtttgcgtagatgttattaaaatgggattttggttattttgttattttttttttggtagatattaaaatggggagttttgtttttaggggggtgttttaagtgttattagaggaggtttggtgatttttagatataagggaagttttagcgtttgtttttagggtgagatggaggtatcgttttcggttttagggaattatagtttgagggggagatgtagtttttgtttttttatttagagaggggttttgtgaggtggtttgggggtatagggtagaagtggattttataggttgagttaaggttttaagagttttagtagtgtatttattatttggtatttttgtagt

SEQ ID NO: 216 - DNA, 6558 bp, Artificial Sequence
  chemically treated genomic DNA (Homo sapiens)
gttgtagaggtgttaggtgatgggtatattgttgaggtttttggggttttagtttagtttgtaggatttatttttgttttatgtttttaagttattttataaaatttttttttgaatgggaaggtaggggttgtattttttttttagattgtggttttttgaggtcggaggcgatatttttattttattttgagggtagacgttaaagttttttttgtgtttgggagttattaagttttttttgatggtatttgggatatttttttgagggtagggttttttattttagtgtttgttagaagggaaatgatagggtgattagagttttattttgatggtatttgcgtaggttttggggagtagggttatatgtatcggttggtagatgggggtttttgtgtagtttggtaggagttatggttatagtttaggagtaggaagttttttgaaggagtcgtttttttttttagattcgggatttttgaagttagaggtatttttttttgttatttaattggaagtttttttgggtaggagtgtttttttttttagattaggagtttttagagggtggggaatgtgtttttttttattttgaaggtttttgagtttttaggtagataggggtatggatagggtgggggtaatttaatattttttttattaggaaggattttgttggaattagaattaaagatatgaaatgtttattgttttgggattaggatgggatagattttagcggtaaggtttttgagaatatttagattagtttggaaaggttaggtaggttttagggtgaggttagaggagttatgttagaggtagggtatgttttgggtttattatgttagttttgtttttatcgaggtagggggtagagttttgttgtttggggttatgatttaggtagagttttgagatttttgttttttgtattttagttttgttagaatttaggattttgtaaaaaaaaaaaaaaaaaaaaaaaaaaattttaggattttttttgtagtaacgtttatatgtatattttttgtttttaggtttagatttttaaagaagggtttttagattgagatatttaggggagggttttagagtaatttttgtattgagattttatagaggaatttggagaaaaattttttagtcggtcgggcgcggtggtttatttttgtaattttagtattttgggaggtcgagatgggtggattacgagattaggagatcgagattattttggttaatatggtgaaattttatttttattaaaaatataaaaaaattagtcgggtatggtggtgggcgtttgtagttttagttattcgggaggttgaggtaggagaatggcgtgaatttgggagggggagtttgtagtgagttgagattatattattgtattttagtttgggcgatagagcgagattttattttaaaaaaaaaaaaaaaaaaaaaaaattttttagttaatattttagtattttatagagagtttttttaagggggaaggtttagagaggtttaggttgattttattagggaagttggaatgagagaattgtggagataaagatagagatttacggggattttttttattttgtttttagtaggatagaggtatttattagattaggtggtagagatagatttaggaaggagagtaaggtagttaggtttttagggtgaggatttatatgtgggttttattggtttttaatttggtattttaaggaaattaaatttgttttaatttgattttattaaattttggttttttgttatttttatttatttttttttagtttttttttttttagagagtgttagttttattattagttgggggagggttttaggttaggttaagggtagtttttgagtttatttaggttatagtgggaagtgggaggtgtcgtggggattgggtattttggatcggggtgaggggaggtaatttttgttttggggtttggagattggtgttaggttttatttttatgatatgtttgtgagttatagtttatttttgtgtgagaggttgtgagtatacgttgagattttatggtttagtgttcgtgtatatatatgcgtttgtgtgtgtgagagagaagtaatttggggttatttttaggaagttgggggttagaggaggtagttgggggatattaggaggagaaggataggattgattttagggtatggatgaagtggagtgatttttaatggttagtattagaatattttttaatgaggtaatgaggtaattaagtgtgtttagaaatatttgggaaggtttttttgtgtaggaaggtgtttggaaggatggggaagtagtgagaaatggggttgttttatatatagtcgtagttgggttgggttatagtttgtggggagtataaggaagtttcgagtagttaaaggttgaataggaaaattttggtttttttttttttagtttgagggttgggtgggtgggtaggggtatatttttatttaaggttgaaaatattagttggatagttttttaagttagaatttaggtttgaagtatagtttttagttatagtttttttttattgttttttatatatatgttttttttagattcggagaaaggtaaatattgtggttatttagagtttagtttaagggagggttgtttttttttagggtttttttttttttggttttttgtttatttcggttcgtttgggtattagggtatcgttttttttgtggttttagtttttttttttgttttagttgtcgagtagttttttttttttttttagtttttttattttagttttaagtgatttattcgaggttttaggtttagatgtttaggtagtgatttagcggtatattttttttttttagggttagggtagtagtagttttagagtagtaggtggaagttttagtttagtttggtagggaaagtattggtatagagattttaaataggttttgttaggaggagttttggataatgatatggtaggaggattagattgagaataggttggtttttttttagcggttatcgtgtgatttgggggttagtttgagtagtgtatatgaagttaggttttggggtttttagtgtttttttttatattttggtatagttatcgagtgttttttgttttttttagtatttgaattttttatgttatttgtttttttatcgaggtttattttaagtagaattcggaataaaaattttttatattgagggtgagggataagggagcgtaatgtatcgatttttatagttattttttttttttaattaagggtttttatagggttttttttgtttagaaattgtagtgtatttttatggttgttttttaaagttaggcggtatgtttttatttataagtgggagttgaataatgagaatatatggatatagggaagggaatattatatattagggtttgtgggtagttgcggggagaaggatgggggtaaggggagggagagtattaggattaatatttgatgtatgcggggtttaaaatttagatgatgggttgataggtgtagtaaattattatggtatatgtatatttatgtaataaattatattttgtatatgtatgttagaatttaaagtaaaaataaaataaaattaaattaaaattaaaaatttttaaaaagtttggtagtgaggcgttttagattcggtttgttgttgcgtgttttttaaatatatcggtatatgtaattagtgtggttaagattttcggtttgcgttgatttttttgtttagaacgtgtttatatatgtttatgttttttattttgttgaaatttaattttttttttaaaggttattgtagggagtttttttagggtttaatcggatttagtgtttatttgttttgttttgtataaagcgttttttttgtttttttcgtgtgtatttagagaattttgattttgattgaattatttgtgtatttgtttttttttagttttatttttatatggtgagtttatcggttttatttatttttgtatgaggtaagggtttcgtttatattaggtgttaattagtgtttacggttattatatggtaataggggttattggaggagtgtttaggagtaagggagttttttttatttcgtgaaattatattattgattatgttacgaaataattattttttttttggattttaagagtggaatcgagataacgggtcggaaaagagttttagagagttataaatttttgaggagtgatagtaggaaattgcggtttttaggatttagtgagggagttgagtaaattttttagcgggtagagacggagataggtaggtagacgaagaagataaagagttagttagatggaaaagttagggagaaaaatagagatagtagtagagtcgcgggttattagggttagtttttgaaggtttgtttttaattaggtgtttttgttttaggaattgaggttgcgattgcgtttattaaatggttatatatttgagattggtgataatcgtatttatttgttattaatttgttgcgtaattttgggtaatttttttttttacggtagggtaggagagttgtacggaatggtttttagagttcgattttaattttatttttatattttttagttgtttataaaggtagagtagttaagatataagtaggttttgcggatatttaaagtagtgattttgtttcggtttagttttaggaagttgggtttttatatttcgtttattttattttcgggttttaggtgttagaaattttttattagcggtttcgcgggattttgtttagttgtttcgtgttttttggtggttaaggcgtgttattgtagtgtcggttttttgttatttttttttttttgttcgttagattttttggcgttttgtttacgatttaaataggagatagtgttgatttatttttaagcggtttttttatatttatatttgttttatatagatgaggtttttcggatagtttttgtttagaagtttaggtggatgtttgagacggtagttagatatttggaagttattttaaaagtttagggatatgggtattcgggagataggaggcggaaagattatttgagtttaggagtttgaggttgtagtgagttatgatcgtgttattgtattttagtttggacgatagagtaagattttgttttaattaattaattaatgtaagtttagagataagggtaggagaaaattaggggatagaagtgagggattggttattgttaagttttgtttatttattttttttttttaggtcgtttaggggaaagagaaatggttttattgtgggggttataggtttagtttaagttttgatattgtttttggtttattgtgtgattgtcgattttggttgagtggtgttacgaatttgagtttaaacgtttttagtagaaggattttttttattatgtttcgttttataaaataagttttgaggtattttgttttagtaaaatgtattaaataatttattttttttgttgtattaattggatttataagtgtttttcggtagtatgattagtatgcgaggatttacgttattatattgggtttaggttattttggatttgttatttataatgggcgtgtgtatattttttgttggggggtgtagattgaaattttgaagtattcgttgtgcgttaggtgtttttcgtatattattttatttaatttatataataattttaggagttggaataagatgattttattttatagaggagaatattgagatttaaagtttgttaaatttatataattagtaaggggtggggaggtatgacgaatataggtggttataacgttaaattttttttagaagttttaattatttttcgataattttgagagttttaatattttatttttatttagattagttttagtttttttgtttattttttttttattttatatttagtttatttgttttattttttaattttagtaggcgttagaagtttattttttttttatttttgattttggtattttttttttttgtttttaaatgttttgtggattggattttttttaatttttgtttatttatttatttgagatatagatttattgtcgttaaggttggagtatagtggtattattatagtttattgtagttttatgtgatttttttatattaatttttttagtaattggggttataggtgtgcgttattgtgcgtatttttttgtattttttgtggtgatggagtatgtttgatatttgattcgaattcgagttcggtattttaaggattggaatgggtaaagaattttttagtattgtatagtttttttaaagtataaagtttgggagaattaatatatgtaggataattgaacgtaagagatttgtggaatgtagttttaatttgataattgtgtgttaatcgggagtaataggataggtcgttacggttggttatatttatttatgttagatgtataatgtttggagttttttttattgatgagaagtaatttatgattttg

SEQ ID NO: 217 - DNA, 6432 bp, Artificial Sequence
  chemically treated genomic DNA (Homo sapiens)
tattacgtttagttaattttcgtatttttagtagagatagggttttataatgttggttaggttggtttcgaaattttgattttatgatttgtttgtttcggttttttaaagtgttggaattataggtataagttagtatgttcggtttatattttttaattgtatgtataatttaatttgtagatgattttaaaagtttaaattggagttttattgttttttttatttttagtttttataataaattttatgatagtttttgtttataagaatttttttgtagttttattatttgtaaattatttaattttgttttttcgtgattttttattttttatattttttatattttttagttattgttttaaaaattttggataataaattaatttaaatttttttttaaacggtatttatttatttttatttagatttatatggattggttagaggtaggtttgagattggttgatggaggtttggtttagatttaattaggaggttggtttatatttgttttatatgtttttttttttttttgtatttgttggtttttaagtgtttttaattgaaaataattagtatattaaagtagtatattttggagtggtattttttgaaattttttattggttaggtggcgaagattaattatttgattaatttgttttagagtgtagaataagtttggaattagataggattaagtttaaatttgggttttgttttttattagttatgtgatttttgttaaatatttaatttttttaatttttaaattttttatttgtaaagggaagattagaatagtattgtaaggatatgttttaaaatttaataaggattatttttggataatagggttaagaatttttttaaagtttgtttttaaaaaaaaaatttaaattttttatttataattaatacgtattatttttgtaatttttaaaaagttattttttttaaaatatattattgatgttttttgtaaatatgtggtataattgtaggttttattaatatttgtgaagaattgtaaataagagaatggattaggaaaattgatatttttatttttttttttattgaagataagaaatatatattgaatattgattatttgtagagtacggagtgtggttttatattgaaaaaggaatattttgtgtttttaagggttttataattattagggtagaattttaaaaagtaaataaataataataatgtattttatgttagaatggggtaaatatttttttttaaaaaaaggttaaataaacgaaatgttttttgggttatttttgggaaaggagtgattatagtaggtgaagtattataaaatattttttggaggaggtagtattatggatgatttataaagggtggatgatttttataaattaattatagttttagtgtttattggtttgttttataataaaaggaaaattggttaagagataagagttgagaatgaggttggttaatttataaggagaggaatttttttgttaattgttttagttgatagtaattttaatagttgtatgttataaagtttaggggagtaggaagttttttttttattataattgagaaatttaacgtttaaataaattataatttgatttagtttaattgtgtgtgtttgtgtgtgcgtgtagagtttaaaaagttggtaaaatagattgttagtttttaaaatttttgtttaagttgatatttattgttttttaatttattaagggtttaaacgttattttttttgttttttaaattttgagtcgggttattatttttttgtttttatttgtaaatggtttagttttttatatgtatatattaattgtttatgtgaatatataaaatattatattaagttaaatatataattatgtgtgaaaatgatgttttgattaagggtattagatattttttttaataagaattttaaaaggaagggtattatgataattttttttttttttttttttatttattttttgtttttgagatagggttttattttgttttttaggttgaagtgtagtggtataattatggtttattgtagcgttcgttttttgggtttaagtgatttttttattttagttttttgagtagttggtattatagatatatgttaatatgtttggtttttttttttttttttttttttttagtaaagatgaaattttattatgttgtttaggttggtttcgaatttttgggtttaagtaatttttttatttagattttttaaagtgttgggattataggtgtggattattgtatttagtttgatgaatttttaaaattattaaattgtaatatgtatgagtttatatatttattatttttattatgatgatttttaaaaggttagtttgtatttggtaatgttgaattttgattttttttaattttataggagattggagattaaattagaaatgttaagggtaaataaaattaaaattaatattaatgatgtattatggtaaagattattagttaaatattttattatagatttaaatatttagtttttaataatgtaaaatatttttgtgataattaaggaaaataaagtttttggaatttattggatatttatttgttatattgtgtttttaggagaaagaaagtatatgtttgttatttggaggaatttgggtaaatgtaggaaaaaaaaaagaagaagaaagaaatttatatatttttttatttttaagaaaaggaagtagtggtgatattattttcggttaaaatgtagtttgtttatattttaaatattcggtaataatgttttttttagagttatgaagtaattagaataattaaatataatttttttttaaatttttattgtttgatttatttatttatttaataaatatttattaaatatcgattatgtgtttgatgtttagggatataatagtaagtggagggaaagatatataatatttgtttttaagaaatttggagttgagtggaggatagaaatataaattaaagaatgatataaataattataaagttatagttgttaaaagaaaagtatatggtgttaagagaacgtgtaatataagatttatttatggaggtgagggaaagtttgtttattaaagaagttatgatttaatttacgaagattaggagttggttgggtgaagaaaaaaaggttagaggaaggaagtttatattggggaaggttttaagtataaagggtaggaggattatagaggtatatttacgaaatttggagaaggtttttagtaagtaaggagaagttaaatgaaagtttacgggagagttggaggtttgaagatacgtttaaggatttggtttttattttttttttattttaagagtagtgggaagttattaaatgattttaattagagggttggtataattagttttgtattttgaaaagttgaatttagttttcgtttgagaaattgagtgaaagagtttagaacggtcgtggttgagggtgattcgtgggagatttttatataagttatggtagtggtatgggttggtggtagaagagggaatagggagaagatttggaatttaatttttttttattgataaagttattttagttttggtaaggtaattaattggtgggaaagaagatgtttagtttttttgattttattgtattttttgtatttttaatatgagtattgggaagtggtaaaatatttagaggtagtttgggtgttaggtggagtatgagttaaaattttaggatgaagtaaatgaatatttagaatgataggaaagatttgggagttgggtttgggggagggttatttatttttattttttggagattttggtataaatttttgtttttgtaattttttttttaggtaaaggaatttattaaatgaattgttagaagatttattgattagagggttgtatagaattatatttttgagagtgggaagtaggttgattatatagtttattatttaattaggatatatttgaaagagaaagggggttttattaatatttaaattataaaatatgtatattaggaatgttttgggtaaatttggttgttttagtaagaaaggaaatttgaaagtttatattgttttgtttttatgttatttcgtttgtatatgagagggtaagtattttttttttttatttgtattaagggaataaaagtataagtatttaggtgatttttaatttatttttaattttatagtttttgttatattttatatattttgaaaattatattttttattattattatttcgtgataggtgattatttataattatttattgatttagtttcgggaagaggcggtgtaaaatgggacgttttatttaggtgtttattagaaatgtagaatttttgtttgttttttagatttattgaattagaatttgtatttttaaataagatttttaggtgattaatatgtatattaaaatttgagaaaaatttttagatttcgatttaaagaaaaatattttataatttgatagtgtatgtatatatatatatgtatatagatataattgaagtataaatttaatgaagtagaatttatcgttattattttatttgggaaagaaatgtgttcgcgatttaatagattggagtatttatttttggattttaatttgtaatttgaaaacgtatttttaaagtatttaggagtaatttgaagaaagttgaggggaggcggtagatgttttgatttattagggaaaacgtggacgttttttgttgttattttgtgaattgtgtgtatttagttatttttgagtaaatatttggagcgaggaatttttgagtggtgtgggagggcggtgaggggtagttgaaagtcggttaaagttttcggaggggttggtttaggaaatatgattggtagttacgagagagttaggggttggacgtcgaggagagggagaaggttttcgggcggagagaggttttgtttagttgttggcgaggagttttttgtttttttcgtagcgttgagttgaagttgagtgagttattcgcgcgtacggagcgacgatattttcgcgcgtgtattcgttcgggataggagtcggatttttgtgtagtttttttcggtcgtcgggggttttttcgcgtttcgtcggtttttaggtttttttttggttggcgagcgggcgttatatttggttcgtatatttgcgttgtcggttcggcgcggggttcggagagggcgcggcgcggaggcgtagttaggggttcgggaaggcgtcgttcgttgcgttgggggttcggtttatgacgagtagcggggtttgttatgggtcgggggttgtttaggggtttgtggtcgttgtatatcgttttgtggacgcgtatcgttagtacgattttatcgtacgtttagaagtcgggtgagtggtttttagttcgggttcggcggggcgtcgggggtttttttggggttttcgttttttcgttgcgtttgatagtcgggttcggtaattcggttttcgggcggaaacgaggaaagtttttttcgcgatatttacgtagttcgattttcgtagttgtagggattgtgagttttttttgaaaaagagaaggaaagtttagttgtaaggggcgcggggtacgtttggttttttttgtgcgagtaggaaaggcgttgtgttggtcgcgttcgaggcgagtttttattttcggaaagggaagtttgagaagttggttatttgaaggcggtcggggagtagcggttcggagcggtagtttgagttgttaaagtagttagcgtatttgggttatttcgtttatggcgatgtcgcgtgtttatttagttttttttgagttattcgtttaaaaggttagttttttagtttttagtttttggagacggttacgtttttttttaggtcggttttttggttcggagtttttggaaataagttttaagaaaataatcgatttttaaaagaaagttagttggttttattgacgttttggtatggatggatagggagtggagatgtttaggtgaaatcgagaattttttattgaatgtttattgggtgttagaggttgtagattttgtttggaataagatagttttgtttttagggagttgatggttttatgtaattatcgtttgttggaaatcgaagggttaaaattttaattaggttatttatttgatcgttgtttttgaaggtttttaaggaaaaaataaaaataaaaaaatatatatatatattatatatatataaatatatatataattatatatataaatatatataatattaatatatatatgtatgtaggaatgggggtttttaattatttgttatggaaagtgtaaaatttttgagattttaaaagttagattttttttttttggagacggagtttcgtttt

SEQ ID NO: 218 - DNA, 6432 bp, Artificial Sequence
  chemically treated genomic DNA (Homo sapiens)
agagcgagatttcgtttttaaaaaaaaaaaatttaatttttgaagttttagaggttttatattttttataataaatagttaagaatttttatttttgtatgtatatatatattaatattatatatatttatatatataattatatatatatttatatatatataatatatatatatatttttttatttttattttttttttaaaaatttttagagatagcgattaggtgggtagtttagttaggattttaatttttcggtttttaataaacgataattgtatagaattattaattttttgaagataggattattttgttttaggtaaaatttatagtttttagtatttagtaggtatttagtgagggattttcggttttatttgagtatttttattttttatttatttatgttaaggcgttagtggagttagttaatttttttttggaaatcgattatttttttgaaatttgtttttaaaaatttcgggttaagaagtcggtttgagggaaagcgtggtcgtttttaggagttaaggattgaggagttggttttttgaacgggtggtttaaaaagagttgggtgggtacgcggtatcgttatgggcggagtggtttaggtgcgttggttgttttggtagtttaggttgtcgtttcgggtcgttgtttttcggtcgtttttagataattaattttttaaattttttttttcgggggtgggggttcgtttcgaacgcggttaatataacgttttttttgttcgtataaaggggattaaacgtgtttcgcgttttttgtaattgaatttttttttttttttttaagaaaaatttataatttttgtagttacgggagtcgggttgcgtgagtgtcgcgggggaaatttttttcgttttcgttcgggggtcgggttgtcgggttcgattgttaagcgtagcggagaggcggggattttaggaagattttcggcgtttcgtcgagttcgggttggggattatttattcgatttttgaacgtgcggtgggatcgtgttggcgatacgcgtttataggacgatgtgtagcggttataggtttttgagtagttttcgatttatggtagatttcgttgttcgttatagatcgagtttttagcgtagcggacggcgttttttcggatttttggttgcgttttcgcgtcgcgtttttttcggatttcgcgtcgggtcggtagcgtagatgtgcgggttagatgtggcgttcgttcgttagttaggagggggtttggaggtcggcgaggcgcggggaggttttcggcggtcgagggaagttgtataggagttcggtttttgtttcgagcgggtgtacgcgcgggggtgtcgtcgtttcgtgcgcgcgagtgatttatttaattttaatttagcgttgcgggggaaataggaaatttttcgttaatagttgggtaggattttttttcgttcgagagtttttttttttttttcgacgtttagtttttagttttttcgtagttgttaattatgttttttagattagttttttcgagagttttggtcgatttttagttgttttttatcgtttttttatattatttaggagtttttcgttttaagtatttatttaagaatgattaagtgtatatagtttataaagtaataatagaaaacgtttacgttttttttagtagattagaatatttgtcgtttttttttagttttttttagattgtttttaggtgttttagagatgcgtttttaaattgtaagttgagatttaggagtgaatattttaatttattgagtcgcgagtatattttttttttaaataaaatagtaacggtaaattttattttattaaatttgtgttttagttgtgtttatatgtatgtatgtatgtgtatatattgttaagttgtaaaatgtttttttttaggtcgaagtttagaggttttttttaagttttaatgtatatattgattatttggaaattttatttaaaaatgtagattttaatttagtaggtttaggaggtaggtagagattttgtatttttaatgagtatttggatagagcgttttattttgtatcgttttttttcgggattgagttagtgagtaattgtaaatgattatttattacgaagtgatagtggtgggaaatgtaatttttagaatgtatagagtatagtagaaattgtaaaattaaaagtgggttgggagttatttgaatgtttgtgtttttatttttttaatgtaggtgaagaaagagaatatttatttttttatgtgtaaacggggtaatatgggagtagaatagtataaatttttaaatttttttttttgttagggtaattagatttgtttaagatatttttggtgtatatgttttgtagtttaaatattaatagaatttttttttttttttagatatgttttgattggataataaattatgtgattaatttattttttatttttaaagatatgattttgtatagttttttggttagtagattttttagtaatttatttaatgaatttttttatttgagaggaagattgtagaggtaagggtttgtgttagggtttttagggaataaaggtaaatagtttttttttaaatttaatttttaaattttttttgttattttaagtgtttatttgttttattttggaattttaatttatgttttatttagtatttaagttgtttttggatgttttgttattttttagtatttatgttgaagatgtagaaagtgtagtgaaattaggagggttaggtatttttttttttattaattaattgttttgttaaagttggagtgattttgttaatggaggaagattgagttttaaattttttttttatttttttttttgttattagtttatgttattgttatggtttgtgtaggagttttttacgagttatttttagttacggtcgttttgggtttttttatttagttttttaaacgagagttgaatttagttttttaaaatataaaattagttatattaattttttgattaaaattatttaatggttttttattgtttttgagataaagagaagataaaaattagatttttgaacgtgtttttaagtttttaattttttcgtaaatttttatttggtttttttttgtttattgaaagttttttttaaatttcgtgaatatgtttttgtaatttttttattttttatgtttagagttttttttagtgtggattttttttttttgatttttttttttttatttagttaatttttggttttcgtggattgaattataatttttttgatgggtaagtttttttttatttttatgagtagattttgtattatacgtttttttggtattatatgttttttttttaatagttgtaattttataattatttgtgttattttttaatttatatttttattttttatttaattttaaattttttgagggtaggtattatgtatttttttttttatttattattgtgtttttaagtattaaatatataatcgatgtttaataaatatttgttggatgaatgaatgaattaggtaataaagatttagaagaaaattgtatttgattgttttagttgttttataattttggagaaaatattgttatcgaatatttgagatataaatagattatattttagtcgagaatgatgttattattattttttttttttaagaatggagaagtatgtgggtttttttttttttttttttttttttttatatttgtttaagtttttttagatagtaaatatgtatttttttttttttgaaaatataatgtggtaaataaatgtttaatagattttaaaagttttgttttttttaattattataaagatgttttatattgttggaggttagatatttaaatttatggtggaatgtttaattggtggtttttgttatgatatattattaatgttgattttaattttgtttgtttttaatatttttgatttaatttttagttttttgtgaaattgagaagaattagaatttagtattgttaagtgtaagttagttttttgaaaattattataataaaaataatagatgtgtaaatttatgtatattgtaatttgataattttaaaaatttattaggttgagtgtagtggtttatatttgtaattttagtattttgggaggtttagatgggaggattatttgagtttaggagttcgagattagtttaagtaatatagtgagattttatttttattaaaaaaaaaaaaaaaaaaaaaaaagttaggtatgttggtatgtatttatagtgttaattatttaggaggttgaggtgggagaattatttgagtttaggagacgaacgttgtagtgagttatgattgtgttattgtattttagtttagaagatagaatgagattttgttttaaaaataaaaaataaataaaagaaaaagaaaaaaaaattgttatgatgtttttttttttgaaatttttgttgaaagggatgtttgatatttttaattaagatattatttttatatatagttgtatatttggtttagtataatattttgtgtatttatataagtagttaatatatatatgtaaaaaattgggttatttgtaaatgggaataaaaaaataatagttcgatttagggtttaaaaaataaggaaggtaacgtttaagtttttaatgagttgaaaaataataaatattaatttgaatagaaattttaaaagttgataatttattttattagttttttaaattttgtacgtatatataaatatatataattgaattgaattaaattgtggtttatttaaacgttgggttttttagttgtgatgagagaagaattttttatttttttgagttttgtgatatgtagttgttgaggttattgttagttagagtagttaatagggagatttttttttttataaattaattagttttatttttagtttttattttttgattaattttttttttattgtgaagtaaattaataagtattgagattgtagttaatttgtgagggttatttattttttgtgggttatttatgatgttattttttttaggaaatattttgtgatgttttatttattgtgattattttttttttagggataatttagggaatatttcgtttatttagtttttttttaaaaaaaaatgtttgttttattttaatatggagtatattattgttatttatttgttttttagaattttattttaatgattgtaaagtttttaaaagtataaaatattttttttttaatgtagaattatatttcgtgttttatagataattagtatttagtgtgtgttttttgtttttaatagagagaaaaataagaatattagtttttttaatttatttttttgtttgtagttttttatagatattaatagaatttgtaattatgttatatgtttatagaaagtattaatagtatgttttgaaaaaaataattttttgaaaattataagggtaatacgtgttaattataggtaggaaatttagattttttttttaaaggtagattttaaaaggatttttaattttattatttaaagataatttttgttaaattttggagtatgtttttgtagtattattttaattttttttttataaatgaagaatttgaggattaaagagattaagtatttgataaaggttatatagttagtaaaagatagagtttagatttgaatttagttttgtttagttttagatttgttttatattttagaataaattgattaggtggttgattttcgttatttgattagtgaaggattttaggaaatgttattttaaaatatgttgttttggtatattgattatttttagttgaaggtatttaaagattagtaaatgtagggaggaggagagatatgtggaatagatgtggattaattttttgattgaatttaagttagatttttattagttaattttaagtttatttttagttaatttatatgagtttgagtaagaataagtaaatgtcgtttaaggaaaaatttgggttggtttgttatttagaatttttgaggtaatagttaagagatataagggatgtgaagggtgaggaattacggaaaagtaaggttaaataatttgtaggtggtaaaattataaaggggtttttatagataaaaattattatgaggtttgttatgggggttgaagatgaggaagatagtaggattttaatttagatttttaggattatttataaattaaattgtatatatagttaaagaatatgggtcgggtatgttggtttatgtttgtaattttagtattttgggaggtcgaggtaggtagattatgaggttaggatttcgagattagtttgattaatattgtgaaattttgtttttattaaaaatacgaaaattagttgagcgtggtg

SEQ ID NO: 219 - DNA, 7309 bp, Artificial Sequence
  chemically treated genomic DNA (Homo sapiens)
atgcgattaatggtgttaattgttttttggattgtttttatagtataggataagattatattagttttagtaggttttattgaagaaagtttatgtgttttgtagaaataagatttttagtttagtttaataggagattaattatatgtttattttatttttttttaaggtatgatagtatttggttgagatgtttgtgtgtattttttgtgtgaagttgagtatgtaatttttaaagaaattataaaggagttattcgtttttaaaggaaaaatatatgaattttacgggtataaggaagatattaaaatagggttggggagaagtttttttttttttattttatagtattttttatagaaataattgattgtttgaatatatggttattgaaatatatatatatatatatatatgtatatgaaaataagagttggaatatttgattttgttttttattttttattattttagataatataggatataatatggttttattgtatatatgtgttttttggtttaaaaatattgagagtagatttttgtggaaagaaatatgaaaatttgaggatttatgcgaatgtagttagaggcgaatgtagttagaggggtttttaatttgttggtagagttgggggagagttggggtaattttattgttatgaaattggttttagatggaggtaaggaaaggtgtttattttttgttggtgttagatatagagagattttgtagtatttcgtattttaggtttagaattgtttagtgttgggtagtagttttattgagggtttggttagagtttatggggatgggtggattaggttgtttgttgtttggaaaaggttattttgaatataatgatttttatatggacggtggggtttgggggaaggtatcgtggttagggtttggaggggaagagggaggaaagtaaagaggagtttttttatgaggtaatagaaatgatagtattttttttaggttgaatttttaaaatttagttttgttttggaagattgggattgtggtattttttgtagtgtttttagatcgttttaaggtttttaaattaatgatttataattatgttgtttttttagagagtatttttttttttggttgatatgtggttagtttaggggtggaggagtttcggtagttacgaatttagacgggatgttgattgagagttttgtggttatggtagatgggaggggtgagttttatttatttaaaggtattcgtattttatcgatgagtgtggaattgtgttttttcgttttcgtagtgagacgatcgattaggattgtaggttgagtaaatgggtgttttttggtttatagcgttttttagtattagttagcgggatagagtttcgtgaattttttaaggagttattatttgtttgtttgaatgttggaaaggggtcggtggtgttgattattggatttatttaattaatatttattaaattcgttgttattaatatttaatttttgtgttttaggggtttagattttagtaagggaaatagatgggtaaataattatattagagttagttaagtattgttaaagaagttgatatagggtgttgtggggatatatgggaggggaattagaggaggtttttcggaggaggtgatatttaagttgaggtttgaaggatgtggaagagtttagtaatttttgaagattaaaaaaatggtgataaaaaagatatttttttaattttttagtgttacgatttaagagataaataagtaggtgaacgtataattatattgggttttattataagttagagtttgttttttttaggattttggtattataattttttttgaaattttgttttcggtattgatttttgggggaggtagtaatataggaatttagtgttcgttgcgaaattgatggatggtttttagttttgggtacgtttttatgtgttaaatttgtttaaatggtaggatttattttttttttagaagtatttatttgttttataggattttttatggaattttggagtttttgaggcgagagggattttggatattattgagttttattttttatttaataaatatagaagtggacgtttggataggtaaagtgatttgattaaggtaggtgtatagttattttgtaatattgggaataaattttaggttttttgattttttgtttttattttattttttttttattttttagaaataaagtttttatgtgtttttttttatagtgatatgtttggaatgtattagttagtaatttaggaagggaaaaaaataaatatataagagataaatttgttaggaggataaatttgtattgtttttgattggtttagagggtgattattattatggtagagaattatttaattagtgtaagtaaaatttttttgtgggttgggtattgtataaagatttaaacgaatttgtttatagatttgaaaagtagatacgagatttgtgaatggttggggtttttaagtttatagtataagtatgggttatattttatagtttggaggattgagttttgaaaatgggtaagtttttttatttttttgaattttattttttttatatttaaaataaggatgagtagtttttgaggttttttttacgatttttttttttatagattttagtattttataatttgatataaagagggtggatatgaatttattttttttagaaaagttttaggaaagagaatattaggttattttagtaggtgtgtagataggttagatagattttgaaatttatttagttttttttagatgtataattttattattgtttttagttgttaagagaaagtaggagagtttgtatttttattttttttttttttttttttttttttggagacggagttttattttattatttaggttagagtgtagtggtatgattttagtttattgtaagtttcgttttttaggtttacgttatttttttgttttagttttttaagtaattgggattataggcgtttattattatatttggttaattttttgtgttgttagtatagacggggttttattatgttagttaggatggtttcgattttttgatttcgtgattcgtttattttggttttttaaagtgttgggattataggcgtgagttatcgtatttagtttgtatttttatttttattgttagttttaggtttattttatttagtttattaagtgatgttgaataattaatttttatatattattaggtttatggatattatgatatttagattgatgggtgtttgttgaagggggtgattttagtaggaggatttttttacgtaaggatttatggagtttgttgttttttttttttagggtgagaattaaattgtttttatacggtgggtagaggggaattgatttaggtttggaataagagagaatattttaattgaaaagtttttggaattcgttgaattttaagatattgtgtggattagtttaggatagggagtgagaagaaattaattaaaaggtaatttcgttattttttagttggaaaaaagattagattatatttgtgtttttataattaagtagttgttggaaaaaaacgttttagatgttttttatgagaaaattgttgtttgaagtttagtagaagttatttatttgatatttatattttaggtaaggtttttcgttggagaaaatatcggtattttggataaaattgaaatgtgaaaagaaagggaagagagggtttttattatgtaagatgtttatttaaagtggatttggtttggaaagttttttaaaattttttatatgattgtggaataagttatgtggggcgcggggataagcgaattttttaaattttattacgtatgtttttatttaatttggatttttagagtggtttttagggtattttgtttaggatttagttagttgttggttatatttatgttttttagttttttgagattttatttggttttgagagggttaaaaagtagtgtggttaaatattttaggttttaaagtatttttattgtggttggggaagtaatagaattatattttataaaataatgaaaatagtgttagaaaaatatcgagagatagaaatatttttacgagttaggttatagttagagtgaaggtagggaaggtttttaaagttgggtggaggggataagttaaaaagatgtggaaattggttttttttttttatggttaaagtgtttaaaggggaaaaaggagttttaaaaatgtttttggaaatattattttttacgaatttttcggtttttgttgttttaatgttatttgtttgagatgtaaatagaggagttttgagaaagaagttgaatttgtatttttttttgtttttatttgttttaaatttgtggtatttttaataggatgaagcggaagagaaagggaaagagataaaagtgtagaaagatggaagattttagttgtaaatggttatttgtagttagatggaatagttgttgacgtttagggaaatgtatgtttttttttagatgggaaggagtagtggaaaggggtgacgagtttttggttggttattaattattttatttttttgtgtcggttttttatttggaaagtgggagtgatatttgtgtttgttttttttatttataaagattattgtgagagttataatacggtgagatatagaattttgtttttaaaaatataaagtagaattaagatgttaataataaggatagtaattgtgttagttatttgtaattatttattatagttagtcgtttaggattttggatcgtttttttggttttattatagttttggattagtttatttttaaattttttgttgaagggtggagttttgttagttatgggtagggaattatttttttttgtttttttattttttgttttttaaatatgtttagggtttttgtatttgttgttttttttgtttggtattttttttttgtggtttgttttagagttgatttttgtttttgtttattttttagcgaggatggtattttagggagttttttttttattatcgtagagagagtaggttttttttagttatgtttaatttagaattttgttttgttttttttatagttttagtattatagaaaattattttgtgtatttatggatgtttacgggggtaagggttttgtgttgtttaatttagtattttgaatcgtgtttgttgaatgaatatagaatttcgtttgttttgggagagtatagaaaatagttttttattatatattatagttagttgtaaatagtagatggttttttatattttagagagtaagaattagagagagagagaaagagagagagtttgggttttttttttttgtgtttgttttttttagagaaattggaggggtagtagttagtattttttcgttggttttattaagtatagttaaggtttttaggatatggttattttttatttgtggaagcggttttgttggggtgggtgggtgttagttggttttggtttgggttagagatatttagtggtttaggtgggcgtggggttagggcgtagacgagaaggggtacgagggtttcgtttcgaggatttagcggtaagtatcggtttcgggcgcgttttagtttatttattcgcgtgtttacggcggtattattttttataaggatttgaacgattcgggggcggtttcgtttcgttattttttgttttcggtttcgttttttttttggagggtcgatgaggtaatgcggttttgttattggtttgagggggcgggttttaatagttcgaggcggggttttcgggggtttagcgttatattattcggtcgtttaggtagcggcgtagagcgggtagtaggtaggcggcgggcgtttagacggtttttttttttttttttgtttttttagtttttgttttttcgtcgggaggtcgttcgtcgagttttgcgttagcgtcgaggtagtttcgttgcgttttatttcgtttcgtcgggtattcggagggtagcgcgtcggaggttaaggttgtttcgtacggttcggcgggcgagcgagttcgggttgtagtagtttcgtcggcggcgcgtacggtaattttggagaggcgagtagtagtttcggtagcggcggtagtagcggtaatgattttttggttcgggtttatcgtgtttttgggtagttggagtttgggggattggggcgtcgaggcgtgtatatgttcgtttagttatttttaggacgttttttgtaatttcgatatcggtaagcgtttttggtgtttcgttcgagttttacgttgtagttaggattgtagcgttgtttagggaggtagggcgagttttattttttttttttgttttaggagaggggtagacggggttggggcggagtggagaaattcgatgtttttgggcgggggcgttggtatagttgagaggggaagatgttttgtagaggaaatttatagtggttgagggagtttttggtcgtttttgtttttttaatttaggtcgtgaggtttttatcggtttttttgatatttggaaaatgtttttatttattattaacggaggaagggttagaagagaagggtggggaaagggtttttaaaatttggaatgttaattaaagtgttgggaaattgaatagttaaaaaaaaaaaaaaaagttgttcgttatgtgtacggaaagttgtaggagaaatttggagtatttcgagtttgtattattttttgcgtttatgaaatttattttttttattgagatttaatttagttgtaggttttttaggtaagcgttaatcgagtttttgggattgttaagtttgggtggatttaagggggaaaatgaggagaaagttgtggtattgatttacgttttggaggtattgtgtttgagagtgttgatagttagtagaaggtgcgaggggttatttattatatagttgtgaaaatttataggaaggttattttttttttttttgaatgtgtgtggggagggggagaatgggtagtggaaaatagatttgttattaaaagaataaatttgttaagggttatattacggtgatagttttagattggatttagtgttttgagtagagagattttgtaaagagattttttattttttagtgtgtatggagggtttcgagagtattttgggaggtttgtttgggagtgtttgggatatttgtgtttggatggttaaaggtggagtggtatttgggaaatatttttttttttttttttagtttataaag

SEQ ID NO: 220 - DNA, 7309 bp, Artificial Sequence
  chemically treated genomic DNA (Homo sapiens)
ttttatgggttggaaaggaggagagagatgttttttagatgttattttatttttagttatttaaatataagtgttttaaatatttttagataagttttttaggatgttttcggggttttttatatatattaaggagtaggaggtttttttatagggtttttttatttaagatattaagtttagtttggaattgttatcgtgatgtgatttttggtaggtttgtttttttggtgataaatttgttttttattatttattttttttttttttatatatatttaagggggaaaaaaatagtttttttgtgaatttttatagttatgtggtgagtgatttttcgtattttttgttggttattaatatttttaaatatagtgtttttagggcgtgggttaatgttatagttttttttttatttttttttttaaatttatttaaatttggtagttttagaagttcggttagcgtttgtttgggaagtttgtagttgggttgggttttagtgaaaagaatgaattttataggcgtaggagatgatgtagattcggagtattttaagttttttttgtaatttttcgtgtatatggcgggtaatttttttttttttttttaattatttaattttttagtattttagttagtattttaagttttgggaattttttttttattttttttttttagtttttttttcgttagtagtgaatggggatattttttagatgttaaaaggatcggtaggaattttacgatttaagttaggaaagtaaaggcggttaggggtttttttagttattgtgagttttttttgtagggtattttttttttttagttatgttagcgttttcgtttaaggatatcgagtttttttatttcgttttaatttcgtttgttttttttttggggtagaggaaaggagtggggttcgttttgtttttttaagtagcgttgtagttttggttgtagcgtggggttcgggcggggtattaggagcgtttatcgatgtcggagttgtagaaggcgttttgggggtggttgggcgagtatgtgtacgtttcggcgttttagttttttaggttttagttgtttaggagtacgatgagttcgagttaaggggttattgtcgttgttgtcgtcgttgtcggggttgttgttcgtttttttaaagttgtcgtgcgcgtcgtcggcggggttgttgtagttcgagttcgttcgttcgtcgggtcgtgcggggtaattttggttttcggcgcgttgtttttcgagtgttcggcgggacgggatggggcgtagcgaggttgtttcggcgttggcgtaggattcggcgggcggtttttcggcgaaggagtaggagttggaggagtaagaggaggaggagaagtcgtttgagcgttcgtcgtttgtttgttgttcgttttgcgtcgttgtttgggcggtcgagtgatatagcgttgggttttcggggatttcgtttcgggttgttggggttcgtttttttagattaatggtagagtcgtattattttatcggttttttaaaaagggggcggggtcgggggtaaggggtaacggggcggggtcgttttcggatcgtttagatttttatagggaataatgtcgtcgtgggtacgcgagtgggtgggttggggcgcgttcgggatcggtgtttgtcgttgggttttcggagcggagttttcgtgttttttttcgtttgcgttttggttttacgtttatttgggttattgggtgtttttgatttaaattagaattaattaatatttatttattttagtaggatcgtttttataggtgaggggtggttatgttttagagattttgattgtgtttggtggaattagcgggggaatgttaattgttatttttttagtttttttggagagagtaggtatagaggagaaagatttaaattttttttttttttttttttttttggtttttattttttgggatatgggaagttatttgttgtttgtagttggttatgatatatgatagaagattgttttttgtgtttttttagagtaaacggggttttgtatttatttaataaatacggtttaggatgttgggttaagtaatataaagtttttgttttcgtggatatttatgaatgtatagggtgattttttgtgatgttagggttatgaagaaaataaaatagagttttgggttggatatgattggggagggtttgttttttttgcgatagtaagggaagggttttttgaagtgttattttcgttgagaagtggataaagataaggattagttttggggtaagttataggagagaggtattaggtagggggaatagtaagtgtaaagattttgggtatgtttgaaagatagaaagtagaaaggtaagaggaagtggttttttgtttatggttgatagagttttattttttagtaagggatttgggggtgagttgatttaaaattgtagtaaaattaggagaacgatttaggattttagacgattagttataatagatgattgtagataattaatataattattatttttattattgatattttgattttgttttgtatttttaaaagtaggattttgtattttatcgtattatagtttttataataatttttgtgggtaggaaaagtaagtataagtattatttttattttttagatgaggaatcggtatagaaagatgggatgattggtggttagttaggaattcgttatttttttttattgtttttttttatttgaagagagatatgtatttttttgaacgttagtagttgttttatttaattgtaaatggttatttgtagttgggattttttatttttttatatttttgtttttttttttttttttttcgttttattttgttagaaatgttataagtttggaataaatagaaatagggagaaatgtaagtttagttttttttttagaatttttttgtttatattttagataagtgatattgggatagtagaggtcgaagaattcgtgagagatggtatttttaagaatatttttgaaattttttttttttttttgagtattttagttataggaaagggaaattagtttttatatttttttgatttgttttttttatttagttttaaaaattttttttgtttttattttaattgtggtttaattcgtagagatgtttttgtttttcgatgtttttttagtattgtttttattgttttatggggtatgattttattgtttttttaattatagtaggaatattttgaggtttgggatatttagttatattgttttttagtttttttagaattaaatagggttttaggagattggagagtatgggtgtggttaatagttgattgagttttgagtagagtgttttggaggttattttaaggatttaggttgaatgagggtatacgtggtggaatttgagagattcgtttattttcgcgttttatatgatttattttatagttatgtggaaggttttagaagattttttagattaaatttattttggataagtattttatatgatagaggtttttttttttttttttttttatattttagttttgtttaaagtgtcgatattttttttaacggaaggttttgtttggaatataagtattaagtagataatttttgttgaattttaagtagtagtttttttatagaaagtatttgaagcgtttttttttagtagttatttaattatgaaagtataagtataatttgattttttttttagttgaaaagtaacgaaattattttttggttaatttttttttattttttattttaagttggtttatatagtgttttgaagtttagcgaattttaagagttttttagttgggatgtttttttttattttaaatttgagttagtttttttttgtttatcgtgtgaaggtagtttggtttttattttaaggaaaagaaatagtaaattttatgaatttttgcgtaggggagtttttttgttagggttattttttttagtaggtatttattagtttggatgttatggtgtttatgagtttaataatatgtaagaattggttatttaatattatttaataagttaggtggggtgaatttgaggttaatagtaagaatgaagatgtaggttgggtgcggtggtttacgtttgtaattttagtattttgagaggttaaggtgggcggattacgaggttaggagatcgagattattttggttaatatggtgaaatttcgtttgtattaataatataaaaaattagttaggtgtggtggtgggcgtttgtagttttagttatttgggaggttgaggtaggagaatggcgtgaatttgggaggcggagtttgtagtgagttgagattatgttattgtattttagtttaggtgatggagtgagatttcgtttttaaaaaaaaaaaaaaaaaaaaaaagaatgaagatgtaggtttttttgtttttttttgatagttaagaataatgatagagttatatatttgggaagaattgagtaagttttaagatttatttggtttgtttatatatttattaggatgatttggtatttttttttttggaatttttttaggaaaggtgagtttatatttattttttttgtattaagttataggatgttagagtttgtaggaagagaagtcgtaaaaaggattttagaaattatttatttttgttttaaatgtgggaaaaataaggtttagagaagtgaaggaatttgtttatttttagggtttagttttttaagttgtaaggtgtggtttatgtttgtattgtgggtttggaaattttagttatttatagatttcgtatttgttttttagatttgtagatagattcgtttgagtttttgtatagtgtttagtttatagagaaattttatttatattgattaaataattttttattatgataataattattttttgagttaattagaagtaatataggtttgtttttttgataggtttattttttgtgtgtttatttttttttttttttaaattattagttaatgtattttaaatatattattataaaaaaaagtatatgaaaattttgtttttgggaaatgaaaagagagtaaagtggaaataaaaaattaaaagatttgagatttgtttttaatgttgtagaatagttgtgtatttgttttggttaagttattttgtttgtttaggcgtttatttttgtgtttattggatgaaagatagaatttagtggtatttaggatttttttcgttttaaaaattttaagattttatggggaattttgtaggataagtgaatgtttttgaaggggagatgggttttgttatttaaataggtttgatatatgggaacgtatttaagattgaagattatttattagtttcgtaacgaatattgagtttttatattgttattttttttaagaattaatgtcgaaaatagaattttagagaagattgtgatgttaaagttttaggagagataggttttggtttatggtggagtttagtgtagttatgcgtttatttgtttgtttgttttttggatcgtagtattaaaaagttaggaaggtgttttttttattattatttttttggtttttaggagttattgaatttttttatattttttagattttagtttagatgttatttttttcgggaaattttttttgattttttttttatgtatttttataatattttgtattaatttttttgataatatttagttgattttaatgtgattatttatttatttgttttttttgttggagtttaagtttttagaatatagggattaagtgttggtaataacgagtttaataagtattggttgaatgggtttaatgattagtattatcgatttttttttagtatttagataggtaggtggtggttttttggagagtttacggagttttatttcgttggttggtgttagggggcgttataagttagagaatatttatttgtttagtttgtagttttggtcggtcgttttattgcgagggcgggagagtataattttatatttatcggtggggtgcgggtgtttttgagtgggtgaagtttattttttttatttgttatggttataaagtttttagttaatatttcgtttgggttcgtggttgtcggagtttttttatttttgagttggttatatgttaattaaagggggagatgttttttggggaagtaatatagttgtgaattattggtttgggggttttagggcggtttgggaatattgtagaggatgttatagttttagttttttagggtagagttgggttttggaaatttaatttggagaaggtattgttatttttgttgttttatagggaagtttttttttgtttttttttttttttttttttagattttagttacgatgtttttttttaagttttatcgtttatgtgaaagttattatatttaaaatggttttttttaagtaatagatagtttggtttatttatttttatgagttttggttagatttttagtggggttgttgtttagtattgggtaattttgagtttaagatgcgaggtattgtaggatttttttgtgtttggtattagtagggggtaaatatttttttttgtttttatttggagttaattttatggtagtaaaattgttttagtttttttttagttttgttagtaaattgaagatttttttggttatattcgtttttggttatattcgtatgaatttttaggtttttatatttttttttatagggatttatttttagtgtttttaagttagaaaatatatgtgtgtagtaaagttatgttgtattttgtgttatttagggtggtgggaaatggaaagtagagttaaatattttagtttttgtttttatgtgtatgtatgtgtgtgtatgtatgttttaatgattatatatttaagtagttaattatttttgtgaagggtattatgaaatggaaggagaagaatttttttttaattttgttttaatgttttttttatgttcgtggagtttatgtgttttttttttaaaaacgagtagtttttttgtggtttttttgaaggttgtatgtttagttttatatagagaatatatataagtattttagttaggtgttgttatgttttgggagggaatgggatggatatgtggttggttttttgttagattgggttggaggttttgtttttgtaaggtatatgagttttttttagtggaatttgttggaattgatatggttttgttttgtgttgtggggatagtttaaagagtagttaatattattgatcgtat

SEQ ID NO: 221 - DNA, 15863 bp, Artificial Sequence
  chemically treated genomic DNA (Homo sapiens)
agttttaatttcgtaggtttaagcgatttttttattttagttttttaagtagttgggattataggtttaatttttttgatagagataggatttggttgtgttattaaggttggttttaaatttttgggtttaagtatttttttattttggttttttaaagtgttgggattataggtatgagttattatattagttataaaaattttttgaatataaatttattggttaggagtagtgtttacgtttgtaattttagtattttaggaggcgtaaatgggtggattatttgaggtcgggagtttgagattagtttggttaatttggcgaaattttatttttattttaaatattttaattagtcgggtgcggtggtgcgtgtttgtaattttagttatttaggaagttgaggtagtagaatcgtttgaatcgggatatagaggttgtagtgaggtaagattatattattgttttttagtttgggttatagagcgagattttgttttaaaattttttttttttaaagaaagttaaaaagaatataaattgattatttgtattgtaagatatattttttaaaatgttttaatattataattattaatattataattacgatttcgatgaattattttcgagagttgaaaatttgatagtcgttattatcgttttagaaagtagtataaaaaagaaagagtgttgatggaggaggagaaggtttagtagagttttgagtgtttgagtgttttagcgtagggaggtggagatagtgatttatgttgttaagagatgtagtgaggcgaatttagagaatgatttaagaggggttgggcgcggggtttatgtttgtaattttagtattttgggaggtcgaggtaggaggattacgaggttaggagatcgagattatggtgaaatttcgtttttattaaaaatataaaaaattagttaggcgtggtggcgggcgtttgtagttttagttattcgggagaggttgaggtaggagaatggcgtgatttcgggaggtagagtttgtagtgagttgagatggcgttattgtattttagttgggtgatagagcgagattttgttttaaaaaaaaaaaaaaaatattttttttatgattttttaaataaattttaaatgttttatttataagaattaatacgacgtggttgtttttttttgtttttatttttttgttttttttatttgttttagtttggttatattagtattttgggttttttgttttgtgtttgtttgtttgtttgtttgtttgtttgtttgttttgggatggagttttattttgttatttaggttggagtgtagtgatatgattttggtttattgtaatttttattttttgggtttaaatgatttttttgttttagttttttaagtagttgggattataggtatttattattatatttagttaatttttgtatttttgtagagatgaggttttgttatgttggttaggttggttttaaatttttgattttaggtgatttgtttattttagttttttaaagtgttgggattataggtgtgagttattgagtttagtttgttttgttgttttttgagatggagttttattttgtcgtttaggttggagtgtagtggtataattttgtttgattgtagtttttattttttgagtttaagagatttttttgttttagttatataagtagttgggattataggcgcgtgttattatatgcgtttaattttggtatttttagtagcgatggggttttgttatattggttaggttggtttcgaatttttggttttaagtgatttgtatatttcggttttttgagtagttgggattataggcgtgagttattatgtagggtttttttggttttttaacgtataaagttattttttagttttgggtgtttatagtattattgttagtttttggaaagttttttttagaagtttttatatgattgattttttatttttttttaggttttagtttaaatgttttttttttagagagtttttttttgattattttatgtaatgtgtttttttttagttagtttttttttattttgtgtattttttttagagtatttattattattttggttttgatgtttgttggtttatatgtttgttgtttgttttttatatagaaagtaaattagttttttatttgttttgtttattattttattttagtatagtgattaatatatattagtagttaattaataaatagttataagttaggtacggtgatttatatttgtgattttcgtattttgggaggttaaggtgggcggattttttgaggttaggaatttgatattagtttgtttaatatggcgaaatttcgtttttattaaaattataaaaattagtcgagtgtgatggcgtgcgtttgtaatattagttatttgtgaggttgaggtaggagaatcgtttgaattcgggaggtagaggttgtagtgagtcgagattatattatagtattttagtttgggtgatagagtaagattttgttttaaaaaaataagaaatagaaatatatatatgttgttataagaaatttattattttttagtaaaaaatatagatttttaattaaagaaaggggaaatttttttttaaataattttagaattcggggtagaaaacgttatatgtggaaattcgttttgaaaaatagtttcgtttgtgaataggaaatatttggattatattttttttatttttacgaaggatttaaatgtgtagtattgatgaagaggtagttagttttagtttttattatttttgtatattttatttgtttttttttatggtatagttttgggggtaggttataaattcgtaagatgttattagtattattggttaagatgtaggaatcgttaggagttttagaaataggggagagttagaaagttggttagatttatgttttttaagtgtagggttagggttgagtttgtttttggggtaggtaagtttttttgaatttttgagggaagtagaagatataaattgttagataaaatgtaagtttagtttaaaagggttacgtgtcgttttttttagttttggggtattttttttttagaaaattggattgttttatagtgaaaatttcgggggtggttagttttttgtttcgttgttatttttattatttatagttttttaagaagtttttaggttgggtgttgaattttgattaggaattattgagaaatcgaggtagttgggagaagttgtagttttaagcgttgaaaggaagatgggggataataaatttgggtcgttaagtaaagggggtagaggtttggagaagtgggttttaggattagaggatagatcgattttatattttatttttttagattttatattttattgttattattatttacgtgtttttttcgttttttgtagcgggttttttagaggtattttttatggtttttttagattttaattttggttcgttcgttttttttttagaaaggttttcgtttgttttttttgtaggaaggtttgtatttttagaaagtttttgtttttcgattcgaggatttaatttattaggggaattaaattttgtttttaggggagtggagagagaaattgggtttttttttcgtagtttttgggatatagttgagttagttataggatttggggataatcggggcggattttttttttcgggaggcggtggtattagtttagagttcgtatttttatttatcggggaagcgtggggagaaggatgggttggagttgggttttggtttgaaggatagtagttcggagttaacggttgagtttttaaagtttttatattgtagaggaagtatagcggagattagttttagttaggatggtttcgaagtttttagggattcgacgtagagttaaagaaatttatttgtgtttttttttttttttgggagtaggtagaagattttcgggaggagaggcgaatagcggacgttaatttttttgaaagtattgtgttttttagtatcgcgggtcgttacgggttttttgttgtcgcgggatttcggtttatttttcgattgggtcgtcgtatttcggattagatttcgcgggcgatttacggaattcgcggagtcgggacgtgaaaggttagaaggtttttcgtttttattaagttttagggtttttcgtggttgttgggagttgtagtttgaacgtttttattttggcgagaagcgtttacgttttttttatcgagtttcgcggtaatttttaaagtatttgtatcgttttttcgtcgtttgtagagggcgtagtaggttttgtattttttttgtattttattttttaggttttagatttgttttttttatttaaaaaatatttattatcgagtttttatttgttatttagtattgatataggtatttaggaatataataatgaataagatagtagaaaaattttatatttttataaggtttacgtttttatgtattgaaagtaatgaataaataaattttattagagtgataagggttgtgaaggagattaaataagatggtgtgatataaagtatttgggagaaaacgttagggtgtgatattacggaaagtttttttaaaaaatgatattttaattgatgagaagaaaggatttagttgagagtaaacgtaaaagtttttttttttttattttttatatttgatataatgtaggatttttttaaaatgatttttattaattttgtttttatagttttggtttgtagaattttttattttaaaatgttagtatttacggtattaggtcggcgagaattttgattttgtatttttttttttaattttattttttttgtttttttcggtaggcggattatttgtttttatttgttatggcgattgtttagttttgtgttaggagtttcgtaggggttgatgggattggggttttttttttttatgtgtttaagattggcgttaaaagttttgagttttttaaaagtttagagttatcgtttagggagtaggtagttgttgggtttcggggatattttgcgttcgggttgggagcgtgttttttacgacggtgatacgtttttttggattgggtaagtttttgattgaatttgatgagttttttttgagttacgggttttcggtttcgtgtatttttagttcgggaaaatcgttggggttgggggtggggtagtggggatttagcgagtttgggggtgagtgggatggaagtttggttagagggattattataggagttgtattgttgggagatttgggtgtagatgatggggatgttaggattattcgaatttaaagttgaacgtttaggtagaggagtggagttttggggaattttgagtcggtttaaagcgtatttttttgtatatttattcggtgttgggcgtagggaatttttgaaataaaagatgtataaagtattgaggtttgagatttttggatttcgaaatattgagaatttatagttgtatattttagagtttatggtattttagtgaaaattggggttttatttcgaaatgattatttgggggtgattcggggagtttaagttgttaaggttttataattttcggatttttgttttttttggagcgatttttttaggtagttttcggtttcgttagatggagaaaatttaattgaaggttgttagtcgtggaagtgagaagtgttaaattaggggtttgttcgttaggtcgaggaggatcgtcgtaatttgagaggttcggtagttttgttattgtttggttttatatttatatttttgttttttgtagtagtattttcggtttttttttgtcggagtagtttattatttattcgatgagaggggaggagagagagagaaaatgttttttaggtcggttttttttatttggtagagggaggttgttatttttcgtttgtatttttttttttggattatttagttatggtttttgtaaaggtaggggtatttgttttgatgtaaattttaatttttttttttttttgaatggtgtgttttatttttcgggtcgtttgtaatttaggcggacgttattatggcgtagatagggagggaaagaagtgtgtagaaggtaagttcggaggtatttttaagaatgagtatattttattttttcggagaaaaaaaaaaaagaatggtacgtttgagaatgaaattttgaaagagtgtaatgatgggtcgtttgataatttgtcgggaaaaataatttatttgttatttagttttgggttaggttattttagttttagacgtaggttgaacgtcgtgaagcggaaggggcgggttcgtaggcgttcgtgtggtttttcgtgtagttttcggttcgagtcggttttttttggtaggaggcggaattcgaatttatttttttcgttgttttattttttagttcgcggttgttttatttcgtagtttttttttatgtatttgtcgcgtatcggttattttgtgtcgtatttacgttattttttttttaaatcgaggtggtatttatatatagcgttagtgtatatagtaagtgtataggaagatgagttttggtttttaatcgtttcgtgatgtttattaagttatagattttttttatcgttttagaaacgttttattacgtttttttttagtcgattttcgattttatttttattttgatttttataattattttgtttgttggagaattttatatagaatggaattaggatgggcgttgtggtttacgtttgtattttggtttacgtttgtattttgggaggtcgaggcgggcggattatttgaggataggagttttagattagcgtggttaacgtggtgaattttcgtttttattaaaaaatataaaaattagttgggcgtggtgggtgtttgtaattttagttattcgggagggtgaggtaggagaatcgtttgaattcgggaggtagaggttgtagtgagttaagatcgtgttattatattttagtttgggcgataagaacgaaatttcgttttaaaaaaaaggggggaattatatattatgtgtttatttttgtcgggtttttgttttttaatgtattgtttgatattcgtttatgttgtatatattagtattttgtttttttttatttagtatagtttatcgattgtatattcgtttttttgatggttttttgagttgttttttatttgcggttatgaaataaagttgttataaatatttttgtataattttttttgtgattatatgttttcgtgttttttggagaaatatttaggaggggaattgtggaggaagtaaaaagtagttgtattttgaatttttttagaagttttgagttttttagagcggttgtattattttatattttaattagtaaggtatgggagttattatggttgtgttatagtttttcggatattaggtatgttagtttttttaatgtggtatatttttgtggttgtaatttatagttttttattgattaaggatgtttagtatttttttatgtgtttattggttattcgtattttgtttgtaaagtagtttttcgagttttttatttgttattttggtttttttgtttgtttttattgtttagttgtgggattgttttatattttttggatataagtttttattagatttatgagtcgtgaatgtttttttttgatttgttgcgggtttatttgtttgttttatagagtttatagaattttaagaggagtggattaattttttttatgtttagtatttgttttgttttgtttaggatatttttttttttttttttaattttagggttatgaagatataattttatatttttttttaggatttttatggtggtaagttttatagtaaggtttttaagttattaattaatttttaaaattaattgtttatggtgtgaggtgtaggagttagtttttggtattttttttgtatggaaatttagttattttgtttttatttgttgaaataggttttttttttttattgaatgtttttaattttaattattttatagttggagtatagggttattattttagtgttattttttttttttttttgttaatttttgagatagggatttatattgttgtttaggttagagtataatggtataattaaggtttattgtagtttcgaatttttgggtttaagtagttttttagtagttttacgagtagttgggattattttattatatttagttaattattttatttttttgtattgataggattttattatgttgtttaggttggttttaaattgttggttttaagtttttattttatttcggttttttaaagtgttgggattataggtgtgagttattatgtttgattttttagtgttattttttatttattttttttgttttttgttttttttaaacgttggaggaagaaatagtatttattttatataaattttttagaaaatagaggaatagattgggcgcggtggtttatatttgtaattttagtattttggtacgttgaggtaggggattatttgaggtcgggagttcgagattagtttggttaatacggcgaaattttatttttattaaaatataaaagtagttaggcgtgtattatatttgtaatgttagttatttaggaggttgaggtataagaattttttgaatttgggaagcggaggttgtagtgagtcgagattgcgttattgtattttagtttgggtaatagagtgagattttgttttagaaaaaaaaagaaagaaagaaaaaatagaggaatattttttaatttgttttcgaagttaggataattttggtattaaaattaaataaggatattataagaaaagaaaatatagattaatatttttgttagtatagatatgtaatagttaattaattttagtaaattaaatttggtaatatagaaaaaaggataaataggttagtcgcggtggtttacgtttgtaattttagtattttgggaggttgaggtaggtagattatttgaggttaggagtttgagattagtttgattaatatggtgaaatttcgtttttaataaaaatataaaaattaggttgggtacggtggtttacgtttgtaattttagtattttgggaggtcgaggtgggtagattacgaggttaggagtttaagattagtttgattaatgtggtgaaacgttatttttattaaaaatacgaaaattagtcggtgtggtggtatttgtttgtaattttagttatttaggaggttgaggtagaattgtttgaattcgggaggtagaggttgtagtgagttaagatcgtgttattgtattttagtttgggcgatagagtaagattttattttaaaaaaaaaaaaaattagttgggtatggtggtgggtatttgaaattttagttattcgggagtttgaggtaggagaatcgtttgaatttaggaggtagaagttgtattgagttgggattatattattgtattttagtttgggtaatagagtgagattttattttaaaaaaagaaaaagaaaaaggataaatatattttaattaaataatgtttattttatgattgtagttgatttaatatttaaaaattggtttggtgtagtagtttaggtttgtaattttaatattttaggaggttgaggtaggaagattttttgagtttaggattttaagattagtttgggtaatatagttagattggtttttattggggggaaaaaaattagtttgtgtaatttattatattaataaagggaaatataaaaattttatgattattttaatagatgtagtaaaagtagttaatgatattaatatatatgtatgattataaattaattaattttttagtaaattagggaaaggaaatttaattagtttgataatagggcgtttatagtcggagttttattagtagtatatataatggtagaaaatttagtgttgttgggggcggtggtttacgtttgtaatgttagcgttttgggaggtttaggcgggcggattacgaggttaggagatcgagattgttttgattagtatgttgaaatttcgtttttattaaaaatataaaaataaaaaattagtcgggtatggtggcgggcgtttatagtgttagttattcgggaggttgaggcgagagaatggcgtgaattcgggaggcggagtttgtagagtttagatcgtgttattgtattttagtttgggtgatagagtgagatttcgttttaaaaaaaaaaaaaaaaaaaaaagaaaagaaaatttaacgtttttttttttaagattaggaattagaaaaggatttgatttttataacgttgatattatattggaggttttaattaggtaagaaaaagaaataatgagggtcgggtgcggtggtttaggtttgtaattttagtattttgggaagtcgagacgggtggattacgaggttaggagatcgagttattttggttaatacggtgaaattttgtttttattaaatatataaaaaattagtcgggcgtggtggcgggcgtttgtagttttagttattcgggaggttgaggtaggagaatggcgtgaatttagggggcggagtttgtagtgagttgagatcgagttattgtattttagtttgggcgatagagtaagattgtgttttaaaaaaaaaaaaagaaaaagaaataatgattagtggttcgatgttttacgttagtaattttagtattttgggaggtcgaggtgggtagattatttgaggtttggagttggagattagtttgataaagatggtgaaatttcgtttttattaaaatattaaaaaaatagttaggcgttggtcgggtatagtggtttatgtttgtaattttagtattttgggaggtcgaggtgggtggattatttgaggttaggagtttaatattagtttggttaatatggtgaaattttatttttattaaaaatataaaattagtcgggcgtagtggcgggcgtttgtaattttagttatttgggaggtttaggtaggagaatcgtttgaatttgggaggcggaggttgtagtgagtcgagattgtattattgtattttagtttgggtgataaaagtaaaaatttcgttttaaaaaaaaaagaattagttaggggtagtggtgaacgtttgtagttttagttatttaggaggtagaggtaggagaattatttgaatttcggaggtagaggttgtagtgagtcgagattgttttattgtattttagtttaggcgagaagagtaaaattttatgttaaaaaaaaaaaaaaaaaaggaaagaaaaaaaataacgattagaaaggaagaaattaaatatatttatagttagtatgattttatatatattatggttttaatggggttaggcgtggtggtttatgttgtaattttagtatttttaggaggttgaggtaggtggtttttttgggattagttggttaatatggtgaaattttaattttaataaaaatataaaaaattagttaggcgtggtgagggtatttttaattttagttatttaggaggttgaggtaggagaattgtttggatttgggaggtagaggttgtagtgagtcgagatcgcgttattgtattttagtttgggtaataagagtgaaatttcggtagggtgtggttttacgtttgtaattttagtatttcgggaggttgagttaggtcgattatttgaggttaggagtttgagattaatttaatatggtgaaatttcgtttttattaaaaatataagaattagttgggtgtagtggtgggcgtttgtaattttagttatttgggaggttgagatagaagaattgtttgaatttaggaggtggaggttgtagtgagttgagattatgttattgtatattacgtcgggtaatagagcgagatttcgttttaaaaaaaaaaaaaagatgaaattttattttaaaaaaaaaaaaaagttttaatggaaaatttataaaaagttattaaaattaataaataaatatagtagggttgtaggttatagggtaatatagttatttttttatttgtaggggtttggttttgggattttttatatattaaatttatagatgtttaagttttatatataagacggaatagtatttaatttatatatatttttttatatagtttaaattatttagattatttatattatttttatataatgaaaatgttaatgtatatgtaagtatgtatgtaagtatttgtattatattgtttagggaattattggatagataggtttttaagattgatattagtagttattgttaagattttggttaggtttgtttttgtttggggttttagttgattttattgtttttttatttagttaagggtatttgtattttttttggttttttggttatttggaaggtttagtttagtttggtatatttgtattttggtttattgatgttggtatttttgggaaggttttgttttgaaaaatacggagattttagttgttattgaagatttgagagataaagatagggagatttgtttgtagatttgtgtttttttaagtgggattgagattttgggttttttattttaggatagtattttttggtttgttgattgaatagatttttgaaggaggtgtagttgtattttaggagtgggggtgggagtagtattattgattcgtattaataattatatagttttttttagaataataatatagaataagtgaaatagaataattgtagaaagagttaatttttgttgagtttttattgtgtgtttagtattttttttaattttatattttttataatatatagagtattaggtaggcggggtttgggggtttacgtttgtaattttagtattttaggaggttaaggggggtggattatttgaggtcgggagtttaagattagtttgattaatatggtgaaatttcgtttttattagaagtataaaattagttaggtgtggtggtatatgtttgtagttttagttatttagtaggttgaggtaggagaattatttgaattcgggaggaggttgtagtaagcggagatagtgttattgtattttagtttgggtaataagagttgagatttcgttttaaaataaaataaaataaaataaaataaaataaaataaaataaaaaaagaaaagagtttgttattaaaggagttgtttggtaggggatgttttgttagtgtaaataatagaaaagtgggttgggtatagtggtttatgtttgtaattttagtattttgggaggttaaggcgggcggattatttgaagttgggagtttaagattagtttgattaatatggagaaatttcgtttttattaaaaatataaaattagtcgggcgtagtggtcgatgtttgtaattttagttattcgggaggttgaggtaggagaatcgtttgaatttgggaggtagaggttgcggtgagtcgagatcgtattattgtattttagtttggacgagagtaaaattttgttttaaaaaaaaaaaaaaatagaaaagtgtaataaatatttatagtaggtatgttttttagtaaatttgatgataaatttggtataaagaaagagagtatttttgaaaaaaaaaaaaagaaaaagaaagagagtattttgtttgggtaatatagtgaaattttgtttttataaaaaaatttaaaaattggtcgggtgtagtggtttatatttgtaattttagtattttgggagtcggaggcgggaggattatttgaggttaggagttcgaaattagtttggttaatatggtaaaattttatttttattaaaaatataaaaaattaattaggcgtattggtgggcgtttgtaattttagttatttaggaagttgaggtaagaggatcgtttgatattgggaggtggaggttatagtgagtcgagattatattattgtattttagtttgggtgatagggcgagatttcgtttttaaaaaaaaaaagaaaaagaaaaagattaaaaaattagttaggtaggtttttgtggttttagttatttgggaggttgaggtaggagaattattgagtttaggagtggtaggttgtagtgagttatgattgtattattgtattttagtttgggttttaaagtaagattttgttttaaaagaaaaaagaaagaaagaaagaatatggcgggttaggtatagtggtttatatttgtaattttagcgttttgagaggtcgaggtaggtggattataaggttaggagttttatattagtttggttaatatggtgaaattttgtttttattaaaaatataaaaaattagtaggtagggtggtaggggtttgtaattttagttattcgggaggttgaggtaggagaattgtttgaaattagaaggtagaggttgtagtgagtttagattgtattattgtattttagtttgggcgaaaagagttaaattttattttaaaaaataaataaaaaaataaaataaaaaaaaatatggtagtttttgaaagtttgtttgggagaaggtgcgatgatggttgtataatttcgtgtaagatgttggtttatataggggttgttttttgttttttttcgtttttttaattttttatataataggtttgtgtgttatgtatatttattgagtttaagtaggtgtaaggtattgtgatttaatattttggttagtaagataataagatagattattgttttgtttttaggaagtgtatatgttattagaggaaatagataaaataaataaggaaaagtattagataatgtaagtgttatgagaatgtaaatgaggtgatgtgaattaaaataggatgatttaagtttgtacggaaggtttttatttttatgtttttggttagttaaggaattattagttgattagtagagaagggtagttcgtttagttagagtttttggggaagagggagtggttgttaagagatgagattaaagaagtcgagacgggtttttcgtgagggggggttgtaatgtagggttgaggagtgttcgaagagaatgggtaggtgagcggtgagatagttgtttttttagaagttttgtagtgaaaggaattaaagaaatggagtcgtgtattaggtggggaagggtgggggttaagggggtgtttttttttatatagagattgtaggttgagaatgattatatttttgttaataggaggtgggagtagggtacggtagtttatatttgtaattttggtattttaggaggcggaggcgggtcgattatttgaagtaaggagttcgagattagtttggttaatatgtaaagttttgtttttattaaaaatataaaaattagttgggtgtggtggtattcgtttgtaattttagttattcgggagattgaggtaggagaatggtttgaattcggaaggtagaggttgtagtgagttgagattatgttattgtgttttagtttaggtgatagagagagattttattttaaaaaaaaaaaaaaatataggaagggagttgggaatagggtgtatatttaggaagttttggggatttagtggtgggaaggttggaagtttttttttgattgttttttttttaaagaagtgtatggttggtgtggggtggggtaggagtgtttgggttgtggtgaaatattggaagagagaatgtgaagtagttattttttttttgttttataggaagtcgagttgttttagatattggtatggtgttgggggagggggttttttttttgtaggtttaggtgatttagggttggaagtgttttatgttggatttttatttttttttttgtagt

SEQ ID NO: 222 - DNA, 15863 bp, Artificial Sequence
  chemically treated genomic DNA (Homo sapiens)
gttgtaagaggaaaagtggggatttagtatgagatatttttaattttgggttatttgggtttgtagagaaggaatttttttttttaatattatgttagtgtttgagatagttcggttttttgtggagtaggaaaagaatggttgttttatatttttttttttaatgttttattataatttaagtatttttgttttattttatattagttatgtatttttttgaggaaaagataattagagagggatttttaatttttttattattaaatttttaagattttttaaatgtgtattttatttttaattttttttttgtatttttttttttttttgagatggagtttttttttgttatttaggttggagtatagtggtatgattttagtttattgtaatttttatttttcgggtttaagttatttttttgttttagtttttcgagtagttgggattataggcgagtattattatatttagttaatttttgtatttttagtagagatagggttttgtatgttggttaggttggtttcgaattttttattttaggtgatcggttcgttttcgttttttaaagtgttaagattataggtgtgagttatcgtgttttgtttttattttttgttaataaggatatagttatttttagtttgtaatttttgtatggggaaggatatttttttggtttttatttttttttatttgatatacggttttatttttttgattttttttattgtaaagtttttggaagaataattgttttatcgtttatttgtttatttttttcggatattttttagttttgtattataatttttttttacgaagggttcgtttcggtttttttaattttattttttaataattatttttttttttttaaaagttttagttagacgggttgtttttttttgttaattaattggtggttttttggttagttaggaatatgggggtaggggtttttcgtgtagatttaagttattttattttaatttatattattttatttgtatttttatagtatttatattgtttgatatttttttttgtttattttatttgttttttttaatagtatatatattttttaagggtagggtagtgatttattttgttgttttgttgattaaagtattagattataatgttttgtatttgtttgggtttaataaatgtgtataatatataagtttgttatatgagaggttaagagagcgagaaagagtaaggggtagtttttgtgtggattagtattttgtacgaagttatgtaattattatcgtatttttttttagataagtttttaaaggttgttatgtttttttttgttttgtttttttgtttgttttttgagatggagtttggtttttttcgtttaggttggagtgtagtggtgtagtttaggtttattgtaatttttgttttttggttttaagtaatttttttgttttagtttttcgagtagttgggattataggtttttattattttgtttgttgattttttgtatttttagtagagatagggttttattatgttggttaggttggtgtggaatttttgattttgtgatttatttgtttcggttttttaaagcgttgggattataggtgtgagttattgtgtttggttcgttatgttttttttttttttttttttttttttgaggtagggttttgttttgaagtttaagttagggtatagtggtgtaattatggtttattatagtttgttatttttgggtttagtgatttttttgttttagttttttaagtagttgggattatagaggtttgtttggttaattttttagtttttttttttttttttttttttttggagacggagtttcgttttgttatttaggttagagtgtagtggtgtgatttcgatttattgtaatttttattttttagtattaagcgatttttttgttttaattttttgagtagttgggattataggcgtttattaatgcgtttgattaattttttgtatttttagtagagatggggttttgttatgttggttaggttggtttcgaatttttgattttaggtgattttttcgttttcgatttttaaagtgttgggattataggtgtgagttattgtattcggttaatttttgagtttttttgtagaggtagggttttattatgttgtttaggtaggatgtttttttttttttttttttttttttttttagggatgttttttttttttatgttaaatttgttattagatttgttaagaaatatgtttattgtaagtgtttgttatatttttttgtttttttttttttttgagatagagttttgttttcgtttaggttggagtgtaatggtgcgatttcggtttatcgtaatttttgttttttaggtttaagcgatttttttgttttagtttttcgagtagttgggattataggtatcggttattgcgttcggttaattttgtatttttagtagagacggggtttttttatattggttaggttggttttgaatttttaattttaggtgattcgttcgttttggttttttaaagtgttgggattataggtatgaattattgtgtttagtttatttttttgttgtttgtattgataaaatattttttattaaatagtttttttaatggtaggtttttttttttttttattttattttattttattttattttattttattttattttgagacggagttttagtttttattgtttaggttggagtatagtggtattattttcgtttattgtaattttttttcggatttaaatgatttttttgttttagtttgttgagtagttaggattataagtatgtgttattatatttggttaattttgtatttttagtagagacggggttttattatgttagttaggttggttttgaattttcgattttaggtgatttattttttttggttttttaaagtgttgggattataggcgtgagtttttaagtttcgtttatttagtattttatgtattatgggaaatgtagagttgaggaaagtgttgggtatatagtaagagtttaataaaggttagttttttttgtaattgttttattttatttgttttatattattattttagagagaattgtgtgattgttagtgcggattagtggtattgtttttatttttatttttaaaatgtaattatattttttttagggatttatttagttaataggttaggaggtgttgttttgaaatggggggtttaaagttttaattttatttggagggatataggtttatagataggtttttttgtttttattttttaaatttttagtagtaattaaaattttcgtgttttttagagtaggatttttttaggggtattagtattagtgggttaggatataaatgtgttaggttgaattaggttttttaaatggttagggagttaagagaaatgtaggtgtttttggttgggtgggaaggtaatgagattaattgagattttaaataggggtaggtttgattagaattttaatagtggttgttggtattagttttgaaggtttatttgtttagtgattttttaaataatatagtataagtatttatatatatatttgtatgtatattagtatttttattgtatgggggtaatgtaagtaatttagataatttaaattatatgggaggatatgtgtaggttaaatattatttcgttttatatatgggatttagatatttgtgggtttggtgtgtgaggagttttagaattaagtttttatagatagagggataattatattgttttgtaatttgtaattttgttatatttatttattagttttggtagttttttatggattttttattaggatttttttttttttttgagatagagttttattttttttttttttttgagacggaatttcgttttgttgttcggcgtggtgtgtaatggtatgattttagtttattgtaatttttattttttgggtttaagtaatttttttgttttagttttttaagtagttgggattataggcgtttattattatatttagttaatttttgtatttttagtagagacggggttttattatgttaggttggttttaaatttttgattttaggtgatcggtttggtttagtttttcgaagtgttgggattataggcgtaagattatattttgtcggagttttatttttgttgtttaggttggagtgtaatagcgcgatttcggtttattgtaatttttgttttttaggtttaagtaatttttttgttttagttttttgagtagttgggattagaggtgtttttattacgtttggttgattttttgtatttttattagagttggggttttattatgttggttagttggttttagggaagttatttgttttagttttttaaaagtgttaggattatagtatgagttattacgtttggttttattaggattatggtatgtatagaattatattggttgtgaatgtgtttgatttttttttttttaatcgttattttttttttttttttttttttttttttttttgatatggaattttgtttttttcgtttaggttggagtgtaatgggataatttcggtttattgtaatttttgttttcggggtttaagtgatttttttgtttttgttttttgagtagttgggattataggcgtttattattatttttggttaatttttttttttttgagacggagtttttgtttttgttatttaggttggagtgtaatggtgtaatttcggtttattataattttcgttttttaggtttaagcgatttttttgtttaagttttttaagtagttgggattataggcgttcgttattacgttcggttaattttgtatttttagtagagatggggttttattatgttggttaggttggtgttgaatttttgattttaggtgatttatttatttcggttttttaaagtgttggggttataggtatgagttattgtattcggttaacgtttggttatttttttaatattttaatagagacgaggttttattatttttgttaggttggtttttaattttagattttaggtgatttgtttatttcggttttttaaagtgttgggattattggcgtgagatatcgggttattaattattatttttttttttttttttttttttgagatatagttttgttttgtcgtttaggttggagtgtagtggttcgattttagtttattgtaagtttcgttttttgagtttacgttatttttttgttttagtttttcgagtagttgggattataggcgttcgttattacgttcggttaattttttgtatatttagtagagatagggttttatcgtgttagttaggatggttcgattttttgatttcgtgatttattcgtttcggttttttaaagtgttgggattataggtttgagttatcgtattcggtttttattattttttttttttgtttggttaaaatttttagtatggtattaacgttgtgagagttaaatttttttttagtttttgattttagaggaaaaagcgttgagttttttttttttttttttttttttttttttttgagacgaagttttattttgttatttaggttggagtgtagtggtacgatttaggttttgtaagtttcgtttttcgggtttacgttattttttcgttttagtttttcgagtagttggtattataggcgttcgttattatgttcggttaattttttgtttttgtatttttagtagagacggggttttagtatgttagttaggatagtttcgattttttgatttcgtgattcgttcgtttaggttttttaaagcgttggtattataggcgtgagttatcgtttttagtagtattgagttttttattattatgtatgttgttagtggaatttcgattgtggacgttttgttattaaattagttaagttttttttttttagtttgttaggaggttggttggtttgtaattatgtatatgtgttgatattattaattgtttttgttatatttgttgaaatgattatagggtttttatgtttttttttgttaatgtggtgaattatatagattgatttttttttttttagtaaagattagtttgattatgttgtttaggttggttttgaaattttgggtttaagagatttttttgttttagttttttaaaatgttgggattataggtttgagttattgtattaggttaatttttgaatgttgaattagttataattatgagataaatattatttggttagaatgtatttattttttttttttttttttttttgagatggagttttattttgttgtttaggttggagtgtaatggtgtgattttagtttagtgtaatttttgttttttgggtttaagcgatttttttgttttagattttcgagtagttgggattttaggtgtttattattatgtttagttaattttttttttttttgagatgaagttttgttttgtcgtttaggttggagtgtagtggtacgattttggtttattgtaatttttgtttttcgggtttaagtaattttgttttagttttttgagtagttgggattataggtaggtgttattatatcggttgattttcgtatttttagtagagatggcgttttattatattggttaggttggttttgaatttttgatttcgtgatttgtttatttcggttttttaaagtgttgggattataggcgtgagttatcgtgtttagtttgatttttgtatttttattagaaacggggttttattatgttggttaggttggttttaaatttttgattttaagtgatttgtttgttttagttttttaaagtgttgggattataggcgtgagttatcgcgattggtttatttatttttttttttatattattaggtttggtttgttaaaattggttagttgttgtatgtttatgttaataggaatattggtttatattttttttttttataatgtttttgtttggttttggtattaggattattttggtttcgaaaataagttgggaaatatttttttattttttttttttttttttttttttttgagatagggttttattttgttgtttaggttggagtgtagtggcgtaatttcggtttattgtaattttcgttttttaggtttaagggatttttgtgttttagttttttgagtaattggtattataggtatggtgtacgtttagttatttttgtattttagtagagatggggtttcgtcgtgttggttaggttggtttcgaattttcgattttaaatgattttttgttttagcgtattaaagtgttgagattataggtatgagttatcgcgtttagtttgtttttttgttttttgaagagtttgtgtaagatgggtattgtttttttttttaacgtttaaagagagtagagaatagaggagataaatagaaaatagtattaagaggttaggtatggtggtttatatttgtaattttagtattttgggaggtcgagatgggatgaaagtttgaggttagtagtttgagattagtttgggtaatatagtgagattttgttaatataaaaaaataaaatagttagttgggtgtggtggagtaattttagttattcgtgaggttgttagaggattgtttgagtttaggggttcgaggttgtagtaagttttgattgtgttattgtattttagtttgggtaatagtgtgagtttttgttttaaaaattaataaagaaaaaaagaaaatagtattaaaatggtagttttatattttaattgtaaaataattaaaattaaaagtatttagtagagaaaggaagtttattttaataagtggagatagaataattggatttttatataggaaagatattagagattgatttttatattttatattataaataattaattttaagaattaattaatggtttaaggattttattgtaaaatttattattataaaggttttaaaagaaaatgtaagattatatttttatgattttggggttaaaaaaaaaaaaaaagatgttttaaataggataaggtaaatattgaatataaaaaagattaatttattttttttaagattttgtaaattttgtaaagtaaataaataggttcgtaatagattagaagaaaatatttacgatttatggatttgataaggatttgtatttagaaagtataaagtagttttataattgaataataaaaataaataaaaaaattaaaataataggtaaaagattcgaagagttattttataaataaaatacgaatggttaataggtatatgaaaaaatgttgaatatttttagttaatagagaattgtaaattataattataaggatatattatattagaaagattgatatatttaatgttcggaaggttgtggtataattataataatttttatattttgttagttggagtgtaaaatggtataatcgttttggaaaatttagagtttttgaaaaagtttaaaatatagttattttttattttttttataattttttttttaagtatttttttaagaaatacgaaaatatatgattataaaaagaattgtataagaatgtttatagtagttttattttataatcgtaaatgggaaataatttaaaaggttattaaaaggacggatatataatcgatggattatattaaatgaaaaggagtaaaatattgatatatataatatgaacgaatgttagatagtatattgaaggatagaagttcgataaaaatgagtatataatgtatgattttttttttttttttgagacggagtttcgtttttgtcgtttaggttggagtgtagtggtacgattttggtttattgtaatttttgtttttcgggtttaagcgatttttttgttttattttttcgaatagttgggattataggtatttattacgtttagttaatttttgtattttttagtagagacggggatttattacgttggttacgttggtttggaatttttatttttaagtaattcgttcgtttcggttttttaaagtgtaggcgtgagttaaagtgtaggcgtgagttatagcgtttattttgattttattttatatgaagttttttaataggtaaaatggttatggagattaaaataaaggtggggtcgggaatcgattgggaagagacgtgatgaaacgtttttgggacgatgaaaagggtttgtgatttggtaggtattacggagcggttaggggttaaaatttatttttttgtgtatttgttgtgtgtattggcgttgtgtgtaaatgttatttcgatttaggaaaaagatgacgtaagtacggtataaagtggtcggtacgcggtaggtgtatgggaagaaattgcggaatgaaataatcgcgagttaagagatggggtagcgggagaaatgaattcgagtttcgttttttattaggaagaatcggttcgggtcgagggttgtacggaggattatacggacgtttgcgggttcgtttttttcgttttacgacgtttagtttgcgtttggaattggaatggtttagtttaaagttagataataggtagattgtttttttcgataaattattaaacgatttattattgtatttttttaaaattttatttttagacgtattattttttttttttttttttcgggaagatgagatatgtttatttttgaaagtgttttcgggtttgttttttgtatatttttttttttttttgtttacgttatggtagcgttcgtttaggttgtaggcgattcggggggtggggtatattatttaaagaaggggagggattgaggtttgtattaaaataaatatttttgtttttgtaaaggttataattaagtaatttagaaaaagaaatgtaggcggagaatagtagtttttttttgttaagtaagaggaatcggtttaaaggatatttttttttttttttttttttttttatcgggtgaatagtgagttgtttcggtaaaaagaaatcggaaatgttgttgtaagaggtagaaatgtaaatgtggagttaaataataatagggttgtcgggttttttagattgcgacggtttttttcggtttggcgggtaaatttttggtttagtattttttatttttacgattgatagtttttaattggattttttttatttagcggagtcgggggttgtttggaaagatcgttttaggaaggataaaggttcggaagttgtgggattttagtagtttgggtttttcggattatttttaaatgattatttcggaatggagttttagtttttattaggatgttatgggttttaaaatatatagttatgagtttttaatgtttcgagatttaaaagttttagattttaatgttttgtgtattttttattttagggattttttacgtttagtatcgggtggatgtgtaaagaagtacgttttaggtcggtttaaggttttttaaagttttatttttttgtttaggcgtttaattttgagttcggatggttttaatatttttattatttatatttaggttttttaataatgtaatttttatgatgatttttttagttaagtttttattttatttatttttaaattcgttaagtttttattgttttatttttagttttagcgattttttcgagttgaaaatatacggagtcgagagttcgtgatttagagaggatttattaagtttagttaggagtttatttaatttagggaagcgtgttatcgtcgtggaaagtacgtttttagttcgaacgtaaagtgttttcggagtttagtagttatttgttttttggacggtggttttagatttttgagaagtttaaaatttttagcgttagttttgagtatatgggaggggaaaattttaattttattaatttttgcgaggtttttggtataaagttggatagtcgttatgataagtaagggtaagtaattcgtttgtcggaggaagtaaaggaaatggagttggggaggagggtgtagagttaggattttcgtcgatttggtgtcgtagatattaatattttggggtggaaaattttgtaagttagagttgtgagggtagaattggtggaaattattttggaggaattttgtattgtgttaaatatgaagggtggaaggaagaaagtttttgcgtttgtttttagttggattttttttttttattagttaaaatgttattttttaggaaggtttttcgtaatattatattttaacgtttttttttagatattttatattatattattttatttaattttttttataatttttattattttgataagatttatttgtttattgtttttagtatatggaaacgtaagttttatgaggatatagaatttttttattattttatttattgttgtatttttgagtgtttatattagtgttgggtagtaagtaagagttcgataataaatattttttgaatgagggagataggtttgaagtttggagaatgagatgtagaagaggtgtaagatttgttgcgttttttgtaggcggcgggggggcggtgtaggtgttttaagaattatcgcgggattcggtagggggagcgtaggcgtttttcgttaagatagaagcgtttagattataatttttagtagttacgaggagttttagggtttgatgggaacgggaaattttttaattttttacgtttcggtttcgcgggtttcgtgggtcgttcgcgaaatttgattcgggatgcggcggtttaatcggaaggtggatcgaaatttcgcgatagtaagaggttcgtagcgattcgcggtgttaaggaatatagtgtttttaaaagaattggcgttcgttgttcgttttttttttcgggagttttttgtttatttttagaagaggagggaagtataggtgggtttttttagttttgcgtcggatttttgagaatttcgaagttattttggttgaggttaattttcgttgtgttttttttgtagtatgaagattttggagatttaatcgttagtttcggattgttgttttttagattaggatttagttttagtttatttttttttttacgttttttcgatgaataaaaatgcggattttgaattgatgttatcgtttttcgaaaggggggattcgtttcggttgtttttagattttgtggttggtttagttgtgttttaggagttacgggagggggatttagtttttttttttatttttttggaaatagagtttggtttttttagtgagttgagttttcgaatcgaggagtaagaattttttgaaaatataagtttttttgtagaagaagtaaacgggagtttttttgaagaagaagcgaacgggttagagttggggtttggaaaagttatggaagatatttttggggaattcgttgtagaggacgagggagatacgtaagtggtgatggtagtggagtgtggagtttggggagatgaagtgtgaggtcgatttgttttttggttttgagatttatttttttaggtttttgttttttttgtttggcgatttaggtttattgttttttattttttttttagcgtttggaattatagttttttttagttgtttcgattttttagtggtttttggttagagtttagtatttaatttgagaattttttgaaaggttgtaagtggtaaggataataacggggtagggagttgattattttcgagatttttattgtaaaatagtttagttttttaggagagggatgttttagagttgggagaagcggtacgtagtttttttagattgagtttatattttatttagtagtttgtgttttttattttttttaaggatttaggggggtttatttattttagaggtaggtttagttttagttttatatttgaaaagtataggtttggttagttttttaatttttttttgtttttagggtttttgacggtttttgtattttgattaatagtgttgataatattttgcgaatttataatttgtttttagagttgtattatgagggggagtaggtggaatatgtagaaatggtaaggattggggttaattgtttttttattaatgttgtatatttaagtttttcgtggagatggaaaaagtgtagtttaagtgttttttgtttataaacgggattgttttttaagacgagtttttatatgtagcgttttttgtttcgaattttgaagttatttagagagaggttttttttttttttaattaggaatttgtgttttttgttaaaaagtagtgaattttttgtggtagtatatatatatttttattttttatttttttgagataaggttttgttttgttatttaggttggagtgttgtggtgtgatttcggtttattgtaatttttgtttttcgggtttaagcgatttttttgttttagttttataagtagttggtattataggcgtacgttattatattcgattaatttttatagttttagtagagacggggtttcgttatgttgggtaggttgatattaaatttttgattttagaggattcgtttattttggttttttaaagtgcggggattataggtgtgagttatcgtgtttggtttatagttatttattgattgattattgatatatgttagttattgtgttgggataaagtggtggataagatagatgaagggttggtttgttttttgtgtgggagatagataataaatatgtaaattagtaagtattaggattaagatgatgataaatgttttgaaggaaatatatagaatgaagagagattaattagaggaaagtatattgtataaaatggttaggaaggagttttttgaaaaggaggtatttgagttaagatttgaaggaggataagggattagttatgtgaaggtttttggaaagagttttttaggaattggtaatgatattataaatatttagaattgggaaatagttttgtgcgttaaaagattagaaaggttttgtatggtggtttacgtttgtaattttagttatttaggaggtcgaggtgtgtagattatttgaggttaggagttcgagattagtttggttaatatggtaaaattttatcgttattaaaaatattaaaattagacgtatgtggtggtacgcgtttgtaattttagttatttgtgtggttgaggtaggagaattttttaaatttaggaggtggaggttgtagttagataaaattgtattattgtattttagtttgggcgatagagtgagattttattttaaaaaataataaaatagattgggtttagtggtttatatttgtaattttagtattttgggaggttgaggtgggtagattatttgaggttaagagtttgagattagtttggttaatatggtaaaattttatttttataaaaatataaaaattagttgggtgtgatggtgggtgtttgtaattttagttatttgagaggttgaagtagaagaattatttgaatttaggagatggaggttgtagtgagttaagattatgttattgtattttagtttgggtgatagagtgagattttattttaaaataaataaataaataaataaataaataaataaatataaaataaaaaatttagaatgttggtatagttagattgaggtaagtgagggggatagaggggtgaggatagagaagagtagttacgtcgtgttggtttttatgggtaaggtatttggagtttatttgggaagttatgagagaggtgttttttttttttttttgagatagagtttcgttttgttatttagttggagtgtagtggcgttattttagtttattgtaagttttgtttttcgggattacgttatttttttgttttagtttttttcgagtagttgggattataggcgttcgttattacgtttggttaattttttgtatttttagtagagacggggttttattatggtttcgattttttgatttcgtgatttttttgtttcggttttttaaagtgttgggattataagtatgagtttcgcgtttagttttttttgggttattttttaaattcgttttattgtattttttagtagtatgagttattgtttttatttttttgcgttggagtatttaggtatttagggttttgttgggttttttttttttttattagtatttttttttttttgtattgttttttgagacggtgataacgattgttaaatttttaattttcgagagtggtttatcgaggtcgtgattatgatattaatgattatagtattaggatattttaaaagatatattttgtaatatagatagttaatttgtgttttttttggttttttttggggggggggggttttgagatagagtttcgttttgtggtttaggttggagagtagtggtgtgattttgttttattgtaatttttgtgtttcggtttaagcgattttgttgttttagttttttgagtagttgggattataggtacgtattatcgtattcggttaattggggtatttggagtagagatggggtttcgttaagttggttaggttggttttaaattttcgattttaagtgatttatttatttgcgttttttaaagtgttgggattataggcgtgagtattgtttttggttagtgagtttgtgtttaaaagatttttgtggttggtgtggtggtttatgtttataattttagtattttgggagattaaggtgggaggatgtttgagtttaggagtttgagattagttttggtaatatagttagattttgtttttattaaaaaagttgggtttatggttttagttatttgggaggttgaggtgggaggatcgtttgagtttgcgaggttgaggtt

SEQ ID NO: 223 - DNA, 6077 bp, Artificial Sequence
  chemically treated genomic DNA (Homo sapiens)
aaaatatgagaaagtaagtatttgatattttttattttaaaagaggggggttttcggaatgttattgttttggtttttagtgattgtggtttttttttttgttagaggttttatgtttagattattagtgatatttttagtttttaaagattagtttagtttatataagggtaatgttgaaatatataagttaggttttaatattgttatattttattgtaaagtataaaagtatgttttaattcgttatttaaagttttaagatatttttaagtttttttttatttgtatgttaaaaattaaatttaaatgggaagtagtattgggagaaagtttttttgtgaattaataattaaaattttttgttagttttataaatatttttggataatttttttaaatttataaagggtaagaattgaggttttatagatgataacgaaaatggtaaggaatgtattaatttttttatgtagtgtcgaatttagagttaaaataatagaagattaaaagataggtttttatttttgtatatataaagatgtttcgtaaatgtttatttatttttattaatttatttttaatacgaaacgggaaatgtttaagtgttagtattatttttttaaagatagtttttttttgtttatatttgtttattatgtttttatttaagtaaataattttaagtaaaaataacgtttgagtatttatttgttgaatgtatattttattatagttttaagattaagaattgatgtttaaatattaattgtttcgttagttttatttattaaggttaaagtagtttgtgttttatgaatcgatattaaaaaagaaagttacgttagtttttcgtgggagaaaagagagataggcgggtgacggtagattggaataaggagttattatagtatttatttttttatattgtagttttgaaaattgtgattagttatagtgaattttttatgaaatggaatatttttattaatattttgaggaattatataaattttattgtaagatatgaaaattagaaatatggatttgttttttttagtttttagggtttttaagaagatgattttagtaatagattattattaagtgttttagggtattttgattagagtgtataagttggaaaaaaatatttaagttaagtaagtagatgtaatttttttttttataatttattgaaatttttataaatggtaaaaataaaaaataaattttttatttaattgaggaggggggtatattgaaaatatattaaggttgagatgttatttaaattaatgaggttttttgttttgtagttgatgttattttatgtgatttggaataaaatttttttgaagaggtaaaaaacgtaatttgagagttaaatttttaaaagttagatagagtataggaatgttaggagtggtaaaatttgaaaaagtattatgatatattagttagttagtataggtggtggataaggaaaacgaagtttattttttacgaggtatgtttttttttagtggttttttaatgttaattgttttttttttttgaggatatatatattaggtattcgggttattttttttttttgaggatatatattattaggtatttaggtatatatattatatgttttgaagtttaaagttatagttttgtgatttaagtatttttttgttatttatggaacgaagattttaaattttagttatgaggataattatttttttatttggggatagaatattagtatttaaattatttattcggtatgtggtagaggagaagagaattagaggagaagtagagatgataaagtagttatattatttattagtttataggtaatagaattattaatttgttttttgtgataaagtaataataaagagtcgatattttttatatttttatttgtgtgtagtcggtattgtcgatatttatttttttaagggtatttttttagattttttatttgtttacggtatttttttgggtttcgtatttgttcgggtatttgtcggggttttgtatttgttcggtttttatatttgtttggggtatttgtttgggtttcgtatttgtttggggtatttgtttgggtttcgtatttgtttggggtattttttcgggttttttatttgtttagggtatttttttgggtttcgtatttgtttggggtatttgtttagatattgtatttgtttcgggtatttgttcgggtttcgtatttgttcgggtatcgtatttgtaggatttttaagttgtttttatttacgcggtcgttttcggttttgttcgtcggggacgttggtatcgaggatgttttgttcgtggtttaggttttcgtcgtttattaggtatttgtcgttcggggagaatttgtagagtaagttggagagtttgaatatttcggagaagtttatggtcgtcgtttgtcgcgggcgttattttgcgttcgaaaattcgcgggatttttgggcgcgtagtaggttgtaatagtcgacgtcggttttcgaggtcggaagttagaaggcggaagtgaattgtagtttattagcgtcgtcggttttcgcgcggtattgtggggtttgtagtttttgtgtcgtagggttttaaaggaaacgtttacgtttttttcgattagggattttcgattcgagaattttattttaaaggtcgggaggtttttgagtatttttagttagggttgttgataaaaatgtagaaagtatagtaaaatttgaattttagatttataataaatttagttataagtatgtttttaaatattgtacgggatatgttaatacggaaaaattattcgttagtttgaaatttaaatttaattgagcgatttgtgtgtttgcgtgtgtgtatatatgtatatatatatatttatatttatatgtaaatgtatgtttatatgtaaatatatgtttatttataaatatatttttaataagtaatacggtgtttgtcgtatatatattatatcgtgtatgtaatgtataagtatttatttcgtttgtttggggttttgtttgtttttgttgagttcgatttttttatttgtcgtttggtttttgttttacgttttagtgttattgagattaaggagagaacgaatttgtcgttgattgggtagagcgagcgcgtggatcgcggttatcgttcgtttattattcgcgcgtatttgggttggtatcgggcgaagaatcgtgcgggtttgggatttgggggtttagagggagcgagtttttgcgcgggcgttcggttcgtaggtttcgtaggtttaggggcgtgtttcgtttttatttttatttcggatttcggtttttttttttagatagcggttttttttatttttggttttcgtaggtcgttagtagttcgcgttaggtttcgtcggcgtttttagggttttttagatcgcgtagattttgatattttcgtttggttttgggttttgggagttgagagtcggttagggttttgttcgtattttcgggcgtttagtttcgggtttgtttttcgcggacgttttaattttttcggtcgaatggatggtggtgcgcgcgcgttttatttcggcggtgtcggttttttttgttgttaaaattagatttaaatttttgtatgggattcgtttttgggtttttatttcgtgcgtttagtaaatagtgggtgagttatgaagatgtgcgagttagtcggatttttttcgttaggcgcggattcgttgcggttagagaatttagtttgcgttagttcggttcgttcgcgaagttacgggttttattgacgcgattttttaagacgtgggggttattatgggtagaggatatcggttcggagttagattacgggttttataagtattagattataagtagcgtcgttattgagagtcgttcggaattcgtttagtatgtcgggttttttagttagggtttggtgtacgtggtcgagggttttggaagtttcgatggtttaggaggagtaggcgggcggggcggcgggtgtcgttggtcggtagagagtttcggtttgatttagcgtaggtttggtgcgcgtagagaataattttaagcgtatcgacgttcgcgagttttttttaaatatcgaacgggatttagagttcgagtttataggcggcggtcgggggagggagtagggtgttggtcgtcgttcgggagtgttcgcgttttgggtgatttttggaaggacgtggggtttaaatttcggttggggttgggagagtagtttttagaggtttttcgcgggattttttgtcgggcgggatcgtggttttataggagaagtgggtggtaagttttgtttggcggaaagtagtcgtttttttttttttgggtttggggcggcgttttttatttttgtttttcgttttttatttttgtttttcgtcggttatattttttgttttttggattttaagcgtttcgcgcgtcgaggagtttagcgttagtggcggcggttaggagagattcgggtgttaggaaagatgggtcgtttgggggatagtagggagttcgggggaaacgtaggcgtcgggtatagagtcggtatcggcgtttttagttttgtcgaagatcgcggtcgggtttggttcgcgggaggggttttggcgtcggatttgtttcggttttgcgtgggcggtttcgtcgggttttgtaggagcgacgcgcgttaaaaggcggcgggaaggaggcggggtagagcgcgttcgggatttcgatttggacgcggttagttggagaggcggagcgtcgggaggagattttggtttcgtcgcgattcggtggttcgcgttgttttttcgcgcgtcgggttaaaaaggcgttaacgttcgcggtcgtttatttttcgcggcgtttttttttttcgcgtttatataattcgtttaggggtcgggtagttcgttttgttttttcgttcgcgtattcgttcggaggttcgcgcgttcgcgaaggggacgtagcgaaatcggggttcgcgttaggttagtcgggacggacgtcgatgttcggggttgcgacggttgtaggtaggaggtttagggtcggggggcggttcggtttcgcgggcgggggttggagcgtagcgttgggtaggtatttgggttcgtagtttcgaagttgggaggtgaggggagagcgatcggggacgagttgggataaggcgatataggggttttttcggagttggatcggtttttgggatttggcgttcgcgagaggttggagcggttagagtttagtttgcgaggagacgcgggttttgtttttagcgtcggtcgtttttggcgttaaagatagtttcgtaggggtttcgggagggttttttttttgttgttttttttttatttcgggtttcgagggtcgttgggagggtaatttcgggaagaggtcggggtgcggggcgcgggtgtaggtggaaatcgttagtaagttttttttcgttcgcgcgtttttttcgatttgtagggttgtgttaatttcgaggttttagtttttttgaggagttagggttaggtttttttttggatagggagaaggatttgggcgggggttttgatttatggagttggttattaagcggtttcgatggtttttcgagggatagttttttgtggttttgagtttgtttgtcgagggtttttggtttgttttcggagcggttttaggtagagaaagttcgtgaagaaatggttcgggtcggtttggagggagatattttacgtttttttagtttttgggtcgtttttttttgtagtttttgtttttttcggggtttggatttggggagcgatgattatttttgtttagtttgtattttggtttggacgttaggagataagtttatgtagtatgtatacgtttgttatataaataggggatagatagacgatttttaattagtaagggtgtagggaaaagtaatgtattttaaatttttgattagaggttatttgtttttaaagatgttgttatttgtttatttattgtttggatatttggaaatggtttaggtttattaatataatg

SEQ ID NO: 224 - DNA, 6077 bp, Artificial Sequence
  chemically treated genomic DNA (Homo sapiens)
tattgtgttaatgagtttgagttatttttaaatgtttagatagtgaataaatagatggtagtatttttggaagtaaatgatttttggttagaagtttggggtgtattgtttttttttgtatttttgttggttgaagatcgtttatttgttttttgtttatgtagtagacgtgtgtatattatatgggtttattttttagcgtttaggttaaaatataagttgagtaaaggtaattatcgttttttaagtttaagtttcgggaaaggtaggggttgtaggaggaggcggtttaggagttaagggggcgtgaggtgtttttttttaggtcggttcgggttatttttttacgggttttttttatttgggatcgtttcggagataggttaggagttttcgatagataaatttagagttatagggagttgtttttcgggaaattatcgaaatcgtttagtaattaattttatgggttaaggttttcgtttagatttttttttttgtttagaggggggtttggttttggttttttagggaagttgaggtttcgggattggtatagttttgtaggtcggagggagcgcgcgggcggggaggagtttgttggcgatttttatttgtattcgcgtttcgtatttcggttttttttcggggttatttttttaacggttttcggagttcggggtggagaggggatagtaggaggagggttttttcggaatttttgcggggttgtttttggcgttaaaggcggtcggcgttgagggtaggattcgcgttttttcgtaggttagattttggtcgttttagtttttcgcgagcgttaagttttaggggtcgatttaatttcgagggagtttttgtgtcgttttgttttagttcgttttcgatcgttttttttttattttttagtttcggagttgcgagtttaggtgtttgtttagcgttgcgttttagttttcgttcgcggagtcgaatcgtttttcggttttgggttttttatttgtagtcgtcgtagtttcgggtatcggcgttcgtttcggttggtttggcgcgggtttcggtttcgttgcgtttttttcgcgggcgcgcgagttttcgggcgggtgcgcgggcggggaggtagggcgggttgttcggtttttaggcgggttatatgggcgcggggaggggaggcgtcgcggggagtaggcggtcgcgggcgttagcgtttttttagttcggcgcgcgggaaggtagcgcgggttatcgagtcgcggcggggttaaggttttttttcggcgtttcgtttttttagttggtcgcgtttaagtcggggtttcgggcgcgttttgtttcgtttttttttcgtcgttttttggcgcgcgtcgtttttgtagagttcggcgaggtcgtttacgtagggtcgaagtaggttcggcgttagggtttttttcgcgggttagattcgatcgcgattttcggtagagttggggacgtcggtgtcgattttgtgttcgacgtttgcgtttttttcggattttttgttgttttttagacggtttattttttttgatattcgggttttttttggtcgtcgttattagcgttgggtttttcggcgcgcggggcgtttggaatttaaggggtaggggatgtggtcggcggggaataggggtgaggggcggggaataggggtgaggggcgtcgttttaggtttaggaggaggggaacggttgtttttcgttaagtagggtttgttatttattttttttgtggagttacggtttcgttcggtagaggatttcgcggagagtttttgggggttgtttttttaattttagtcggagtttgggttttacgtttttttaggggttatttaggacgcgaatattttcgggcggcggttagtattttgttttttttttcggtcgtcgtttgtgggttcgggttttggatttcgttcggtgtttggaaggagttcgcgggcgtcggtgcgtttggagttgttttttgcgcgtattagatttgcgttaggttaggtcgaagttttttatcggttagcgatattcgtcgtttcgttcgtttgttttttttaggttatcggggtttttagggttttcgattacgtatattaggttttggttaggggattcgatatgttgggcgagtttcgagcggtttttagtggcggcgttgtttatggtttgatgtttatggggttcgtgatttggtttcgaatcgatgttttttgtttatggtgatttttacgttttggaaagtcgcgttagtgaagttcgtggtttcgcgagcgagtcgggttggcgtagattgggttttttggtcgtagcgggttcgcgtttgacggggagggttcggttgattcgtatatttttatggtttatttattgtttgttgggcgtacggggtggggatttaaagacgaattttatgtagaggtttgggtttagttttggtaatagaaaaggtcggtatcgtcggagtaggacgcgcgcgtattattatttattcggtcggggaggttggggcgttcgcggggagtagattcgaggttgggcgttcggaggtacgagtaggattttggtcggtttttagtttttagaatttagggttaggcggggatgttagggtttgcgcgatttggggggttttagaggcgtcggcggggtttggcgcggattattagcggtttgcgggagttaggggtggagggggtcgttgtttagggaagaggatcggggttcggagtgggggtgagaacgaggtacgtttttgagtttgcgaaatttgcggatcgagcgttcgcgtaggagttcgttttttttgggtttttaggttttagattcgtacgatttttcgttcggtgttagtttagatgcgcgcgggtgatgaacgggcggtggtcgcgatttacgcgttcgttttgtttagttagcggtaaattcgttttttttttgattttagtggtattggagcgtgaggtaagggttaggcggtaggtagaggggtcggatttagtaaaagtaaataaaattttaagtaaacgaaataaatatttatatattatatatacgatataatatatgtgcgatagatatcgtattatttattaaagatatatttgtaggtaaatatatatttatatgtaaatatatatttatatataaatataaatatatatatatgtatgtgtatatatacgtagatatataggtcgtttaattaaatttgaattttagattagcgagtaattttttcgtattagtatgtttcgtgtaatatttgggaatatatttataattagatttgttgtgaatttgaaatttaaattttattgtgttttttatatttttattagtagttttagttggaggtgtttaaaggtttttcggtttttgaggtaaggttttcgggtcggaaatttttggtcggaagaaacgtgggcgttttttttaaagttttgcggtataagaattataagttttataatgtcgcgcggaagtcggcggcgttgataggttgtagtttattttcgttttttgattttcggtttcggaggtcggcgtcggttgttgtagtttgttgcgcgtttaggggtttcgcgggttttcgggcgtagggtggcgttcgcggtaggcggcggttatgaattttttcgaggtatttaagttttttagtttattttgtaagtttttttcggacggtaagtatttggtgagcggcggggatttgggttacgggtaggatattttcggtgttagcgttttcggcgggtagggtcgggggcggtcgcgtgggtggaggtagtttggggattttgtaggtgcggtgttcggataggtgcggggttcgggtaggtattcggggtaggtgtagtgtttgagtaagtgttttagataggtgcgggatttaggaagatattttagataggtggagggttcggggaggtgttttaagtaggtgcggggtttaggtaggtattttaagtaggtgcggggtttaggtaggtattttaagtagatatgggggtcggataggtgtaggatttcggtaggtgttcgggtaggtgcgggatttaggaagatatcgtagataggtggggggtttggggaggtgtttttggaaaggtgggtatcggtagtgtcgattgtatataggtgagggtataggagatgtcggttttttgttgttattttgttataaaaggtaaattgatgattttgttgtttgtaaattggtaagtggtgtggttattttgttatttttattttttttttaattttttttttttttattatatgtcgaataaatgatttaaatattagtattttatttttaggtaaggaagtagttgtttttatggttgggatttgaggttttcgttttatgggtggtagaagggtgtttaaattatagagttataattttaagttttaaaatatatagtgtatgtatttggatgtttagtagtgtatatttttagaagagagggataattcggatgtttagtatgtatgtttttagaagagggggataattggtattggaaagttattaagaagaaatatgtttcgtaaaaagtgggtttcgttttttttatttattatttgtattaattgattgatgtattatgatgtttttttaggttttgttatttttgatatttttgtgttttgtttagtttttgagagtttaatttttaaattacgttttttatttttttagggaggttttattttaaattatataaaatagtattagttataaaatagaaaattttattagtttaaatggtattttagttttggtatatttttaatgtgtttttttttttaattaaatgagaggtttgttttttgtttttattatttatgaaaattttagtgaattataaggagaaagattatatttgtttgtttaatttgggtgtttttttttagtttgtatattttggttaaaatattttgaaatatttggtaatgatttgttattggaattatttttttgaaagttttgaggattggggagagtaggtttatgtttttagtttttatattttgtagtagagtttatgtggttttttaaggtgttggtaaaaatattttattttataaggaatttattgtaattgattatagtttttaaagttatagtgtgagaaagtaagtgttgtggtagttttttgttttaatttgtcgttattcgtttgtttttttttttttttacggaaaattaacgtggtttttttttttgatatcggtttataaaatataaattattttgattttgataagtaaaattaacgaagtagttaatatttaaatattagtttttgattttgaaattgtagtaaaatatatatttagtaggtgagtatttaggcgttatttttatttgaaattgtttgtttggatagggatataatgaataaatatggataagaagaaattatttttaagaaaatagtattaatatttaaatatttttcgtttcgtgttaggaataggttaatggagataaatgagtatttgcgaagtatttttatgtgtgtagaagtgaaagtttgttttttgattttttgttgttttggttttgagttcggtattgtataagaagattgatgtattttttgttattttcgttgttatttgtgaagttttaatttttattttttataaatttgaggaaattgtttaaaagtgtttataaaattagtagaggattttggttattagtttatagaagagtttttttttaatgttattttttatttaagtttagtttttaatatatagataagaagggatttaaaaatgttttaaagttttaagtagcgagttaaaatatatttttatattttataatagagtatagtaatattaaaatttggtttgtatattttaatattatttttgtatgaattgaattgatttttaggggttggggatgttattggtgatttagatatgaaatttttggtaggagagaaggttatagttattgaaggttagggtagtagtatttcgaaggttttttttttttggagtggagaatgttaggtgtttgtttttttatatttt

SEQ ID NO: 225 - DNA, 2501 bp, Artificial Sequence
  chemically treated genomic DNA (Homo sapiens)
agttgggattataggtgtacgttattatgtttggttaatttttttattttttatagagataggatttcgttatgttgtttaggttggttttaatttttgaatttaagtgatttatttgttttgggtttttaaaatttcgggattataggcgtatagtgttaggtttttatatttttatatatttttttgtttttttagttgtgaaatggagataatgatatagttttaatttacgtgggatgtttagtatagtgtttggtatttgatagatttttttttttttatttgaaatttatttttgagttgggtacggtggtttatatttgtaattttagtatttgggaaaattaaggtaggtagattatttgaggtgaggagtttaagattagtttggtaaatatggtgaaatttcgtttttattaaaagtataaaaattatttgggtgtggtggtatatatttgtaattttagttattttagaggttgaggtacgataattatttgaattcggtagatggaggttgtagttgagttgagattgagttattgtattttagtttgggtgataaagcgagattgtttaaaaaaaaattatttttaatttaatataaaattttttgaatttttttttttttgagttgtttttttatttgagtttattttatattattgaatagttaattatagaattgtgtattattttttttgatttttagatttttagttttttatagtattttgtttttttttgtcgtattagttatagttgtattttttttttttttttttttgagatagagttttattttgttatttaggttgtagtgtagtagtataattttagtttattgtaattttcgtttttcgggtttaagtaatttttttgttttagttttttaagtagttgggattatatgcgcgtattattacgttaggttaatttttgtatttttagtagagacgaggttttattatgttgttaggttggtttagaatttttgattttgtgattagtttattttagttttttaaagtattgggattataggtatgagttattgtattcggttatagttgttattttatttgtgtgattgattatcgtatgacgtttttattgaagtgtagtgaaggtaggaaatatgatcggtttttataatatttttaatatttattattataggtggtatatagtagggttttaataaatatttgtaaaatgaataaagttaatgagtgtttatgtttgtagttttaattgttttgaagtaaatatttgattttttaatttttattagagtgttttgtatatagtaggtttaattatttttttttttttattaattatttatgttttgtaagaatttagttagttgattttttgtattttataagcgtgatgattgggtgttttcgtgtgagatgcgttattttcgaattttgttacgacgtcggtatattgcgcgtttgatatgaagaaaaaaaaaatttagttagtttattaggtatagtggttaaggtttgtaatttttgtattttgagaggttaaggtaggaggattatttgaatttaggagttcgagattagtttaggtaatatagcgagatttcgttttaaataataaataaaaataattagtcgggtatggtggtgcgcgtttatagtattaattattcgggaggttgaggcgagacgatcgtttgagttagggaggttaaggttgtagtgagttaagttcgcgttattgtattttagttcgggcgatagagtgagattttgttttaaaaaaaaaaaaaatattaaattttagaggggcgaaaaaaaattttatagtggaaatatagtaacgagttggtttagtttcgttttcgttataacggtttacggtgttggaggatttttttgcgtacgcgtatagttttcggtcggttattttcgcgagcgcgttttattttttatcgagcgcgcgcgaagattacggaggtcgattcgggagcgcgtacgtagtttcgtttcgcgttcgattcgcggatttcgcggcgttcggttcgggtggtttggatcgcggagggaatgtttcggagggcggagaattgggacgaggtcgaggtaggcgcggaggaggtaggcgtcgaagagtacggttttgaagaagacggcggggaggagtcgggcgtcgaggagttcggttcggaagagttcggttcggaggaattgggcgtcgaggaggagatggaggtcgggcggtcgcggttcgtgttgcgttcggtgaattcgcgcgagtttttttaggttattttttgtaatcgtagttcgcgcgtcgtgttgttcgtatggtttaatttcgacggcgagtcgtagttttatttaacgttgtcgtttggtacgggtcgtcgtatttatagttatcgaggtacgggttcggcgtttaggttcgatttagtagggacgatagtacggtttgaagtttttttatcgtttcggggtttattttgtagacgg

SEQ ID NO: 226 - DNA, 2501 bp, Artificial Sequence
  chemically treated genomic DNA (Homo sapiens)
tcgtttgtaaaatggatttcggggcggtagaggggttttagatcgtgttatcgtttttgttgggtcgggtttaagcgtcgggttcgtatttcggtagttgtggatgcggcggttcgtgttaggcggtagcgttgggtagggttgcggttcgtcgtcgaagttgagttatacgggtagtacgacgcgcggattgcgattgtagaagatgatttgggagggttcgcgcgagtttatcgagcgtagtacgggtcgcggtcgttcggtttttatttttttttcggcgtttagttttttcgggtcggattttttcgggtcggatttttcggcgttcgattttttttcgtcgttttttttagggtcgtatttttcgacgtttgtttttttcgcgtttatttcggtttcgttttagtttttcgtttttcggggtatttttttcgcgatttagattattcgggtcggacgtcgcgggattcgcgggtcggacgcggggcggagttgcgtgcgcgttttcgagtcgattttcgtagttttcgcgcgcgttcggtagaggatggaacgcgttcgcggaaatagtcggtcggaggttgtgcgcgtgcgtagaaggattttttagtatcgtaggtcgttgtaacggaggcgaggttaggttaattcgttattgtatttttattataaaattttttttcgtttttttaaggtttggtgttttttttttttttgagatagggttttattttgtcgttcgggttggagtgtagtggcgcgagtttggtttattgtagttttgatttttttggtttaagcgatcgtttcgttttagtttttcgagtagttggtattgtaggcgcgtattattatgttcgattaattatttttatttgttgtttgaaacggagtttcgttatgttgtttaggttggtttcgaatttttgggtttaagtgatttttttgttttggttttttaaagtgtagggattataggttttagttattgtgtttggtggattaattgaattttttttttttttatgttagacgcgtaatgtgtcgacgtcgtaataaggttcgagggtggcgtattttatacgggaatatttaattattacgtttataaagtataaaaagttaattaattgaatttttataaggtatgggtgattagtaaagagggaaaaataattagatttattatgtgtagagtattttggtggaaattggaaaattagatatttattttagagtaattaaaattataaatataaatatttattaattttgtttattttataaatatttattaaggttttattatgtattatttatggtgataagtgttgaaaatattgtaaaaatcggttatgttttttgtttttattgtattttaataaaagcgttatacggtaattaattatataaataaaatagtaattatggtcgggtgtagtggtttatgtttgtaattttagtattttgggaggttgaagtgggttgattataaggttaggagttttagattagtttgataatatggtgaaatttcgtttttattaaaaatataaaaattagtttggcgtggtggtgcgcgtatgtaattttagttatttaggaggttgaggtaggagaattgtttgaattcgggaggcggaggttgtagtgagttgagattgtgttattgtattgtagtttgggtgatagaatgagattttgttttaaaaaaaaaaaaaaaaaaagtgtaattgtgattagtacgataaaaagagatagggtattatagaaggttaaagatttgggggttaaggaagatggtatataattttgtgattaattgtttaatgatgtgggatggatttaagtggagaagtagtttagaaaaagaagggtttagagagttttatattaggttaaaaataatttttttttagatagtttcgttttattatttaggttggagtgtagtggtttagttttagtttagttgtaatttttatttgtcgagtttaagtgattatcgtgttttagtttttggagtagttgggattataggtgtgtgttattatatttaggtaatttttgtatttttagtagagacggggttttattatgtttgttaggttggttttgaattttttattttaggtaatttgtttgttttggtttttttaagtgttgggattataggtgtgagttatcgtgtttagtttaaaaataaattttaagtagaaagaaaaaaatttattaagtgttagatattgtgttaagtattttacgtgaattaaggttatgttattatttttattttatagttaaggaaatagaagggtatataagaatgtgaaggtttagtattatacgtttgtaatttcgagattttgggagtttaaggtaggtggattatttgagtttaggagttggaattagtttgggtaatatagcgaggttttgtttttataaaaaatgaaagaattagttaggtatagtggcgtgtatttgtagttttagtt

SEQ ID NO: 227 - DNA, 2401 bp, Artificial Sequence
  chemically treated genomic DNA (Homo sapiens)
ttattaaagaaaaaaaagatgatttattagatagttgttaaggtatttatataaaattatacgatagtaggatagatggtaattaagagggaatttaggattcgttattattagttggaaatatttgatttttagtttgtaaatgtgataagttagattaatattagtaggatattgaatatagtttgtagggatgagtttttgcgttatttttggatatgtgtttaagtaattagaataatttaaaatgttattaggtttttgttgttatttttataaatttcgaatagtgagttgggtttttaaggaatttgtttttgttagtttattttatgttgtataataaataggtttaaagtttttggtagcgtatattaagtatggaggattttttatttattacgatagttttttcgttggagggttggggttgtattttatttttttttttggaaggggcggtttttgtttgaggttttatttgttttatagtagagggatgaaacggtaggattttggttttgacgggttttatttggtaatggtatatgttaagtgggttacgttttattgtttagagtaagttatatggttacgtttgatattgacgtgcgggaaatgtagaatttttttgtatttggggaggtagatatttggataatatgtaatttattatagggttagttggatgaagaacggttaagggtttaggttttttatttcgagttaggtcgaattagtcggggtcgtgagattaagttacggttattagtgttcgtttggaattatgttttgtttttgtcgtgtttatattgtagtagggtttttgttttttaatttatttgaaattggtggtgggtgtggtatatagatgagaaataggaattttttacgttgggttttaataggagttgcggtgggaatataaatggtgtagttattttggaagatagtttggtggttttttataaaattaaatgtattttttatatatgattcgttatatattatttagtaattgtattttttggtatttgtttagatgagttaaaaatttgtatttatataaaaatttgtacgtggatgttgatagtagttttatttataattgtttaaatttggaagtttttaggaggtgagtgggtaaataaattgtggtgttttcggttagcggaatattatttagtgttaaaaagaaatgagtttaagttatggaaagatatgaaagaattttaagtattattaagttaaagaagttaatttgaaaaggttgatgttgtatgagtttatatttatgatattatagaaaaggtaaaattataaagatagtaaaaggattagtggttgtaggagttagggaggagggagggatgaataggtggggtatagaggatttttagggtagtgaaattattttgtatgatattgtaatggtggatataggatagtaagtatttgttttttatttcgtagaatgtacggtattgagaacggatttttttgtaatatatggatttttagttataatattgaatttttttcggggtttcgtatcgttcgtagcgttttttaattttcgttttcgtttcgtttatcgttttttttttttgttatagcgcgttcgtttcgcggtcgttaattagtcgcgcgtttcggtcgcgcgtttcgtttcgttttcggtgggtgtgcgcgcggttaatgggcggtgcgcgggggtcgggtcgcggcggggcggggtagcggggcggtcgttaatcgtcgtggtgttgttgaaattgaaaatattatattatgttaatcgcggtcgggttcgcgcgtacgggggtggggttcgcgcgtataaagggggcgtaggcgggttgggcgttttataggttaagtgcgttgtgttcgaggggtgtcggttaggtttgagcgagcgagttagttagtaggtatcgagggggcgcggttgtcgttcggacgagataggcgaattcgacgtagaagagtttattatcggatagttaggtagtcgtcgcgtttttcgtatacgtagagtcgggcggcgcggggttttttttgcgttcggttttcgttttttttttttttttttttttttttttttcgttgtttttttttttttcgttgttcgcgtttgcgtagtttcgggttatgttcgacgcgttttttcgtagtatatttacgatggagcgttttgtcgttcgtgggatttttttagtattagtgcgtattagcgtttgtcgtagttttttcgggtcggtggattacgaggagttgagtcgcgagttgtaggttcgtttggtcgagttgaacgtcgaggattagaatcgttgggattacgatttttagtaggatatgtcgttgcggggttttggacgtttgtagtggatcgaagtgg

SEQ ID NO: 228 - DNA, 2401 bp, Artificial Sequence
  chemically treated genomic DNA (Homo sapiens)
ttatttcggtttattgtaggcgtttagggtttcgtagcggtatgttttgttggaagtcgtaattttagcggttttggttttcggcgtttagttcggttaggcgggtttgtagttcgcggtttagtttttcgtggtttatcggttcgaagaggttgcggtaggcgttggtgcgtattagtattgggaaggttttacgggcgataagacgttttatcgtggatgtgttgcggagggacgcgtcggatatggttcggggttgcgtaaacgcgggtagcgagagaggagaggatagcgagaagaaggggaaaggagaggaggagagggcggaggtcgggcgtaagggagatttcgcgtcgttcgattttgcgtgtgcgagggacgcggcggttatttggttgttcggtggtggatttttttgcgtcgggttcgtttgtttcgttcggacggtagtcgcgttttttcgatgtttgttggttagttcgttcgtttaggtttggtcggtatttttcgagtatagcgtatttggtttgtggaacgtttagttcgtttgcgttttttttatacgcgcgggttttattttcgtgcgcgcgggttcggtcgcgattagtataatgtagtatttttagttttaataatattacggcgattggcggtcgtttcgttgtttcgtttcgtcgcggttcggttttcgcgtatcgtttattggtcgcgcgtatatttatcgggggcggggcggggcgcgcggtcggggcgcgcggttgattggcggtcgcggggcgagcgcgttgtagtaggggaagggggcggtgagcggggcgggggcgggagttaaagggcgttgcgggcggtacggaatttcgaaagggatttaatattataattgaaagtttatatgttataggagggttcgtttttagtgtcgtatattttacgggataaaggataaatgtttattgttttgtgtttattattatagtattatataaggtagttttattgttttaaaaattttttgtgttttatttatttattttttttttttttttagtttttgtaattattgatttttttattgtttttgtagttttgttttttttataatgttatagatgtgaatttatatagtattagtttttttagattggtttttttgatttaataatatttaaggtttttttatgtttttttatgatttgagtttatttttttttagtattgaataatatttcgttgatcggaggtattatagtttgtttatttatttattttttgaaggtttttaggtttgggtaattatgaataaagttgttattaatatttacgtgtaagtttttgtgtggatgtaagtttttgatttatttgggtaaatattaaggggtataattgttggatggtgtgtggcggattatatgtgaagggtatatttagttttgtaaggagttattaaattattttttaaagtggttgtattatttgtgtttttatcgtagtttttgttaaagtttagcgtggagagtttttgttttttatttgtgtattatatttattattaattttagatgaattaaaaaatagaaattttattataatgtggatacggtaaggataaggtataattttaaacgaatattgatgatcgtggtttgattttacggtttcggttggttcggtttggttcggggtgaagagtttgggtttttggtcgttttttatttagttggttttgtaatgaattgtatgttgtttaaatatttgtttttttaaatgtaggaagattttgtatttttcgtacgttaatattagacgtggttatgtaatttgttttgggtagtgaaacgtgatttatttggtatgtattattgttaaatggagttcgttaaagttagggttttgtcgttttatttttttgttgtgagataaatgagattttagataggggtcgttttttttaaaagagaaaatggagtataattttagttttttagcgaagggattgtcgtggtgagtgagagattttttatgtttgatgtacgttgttaagagttttgggtttgtttgttatgtagtataaggtaagttgatagagataggttttttgaagatttaatttattgttcgaggtttatgggaatgatagtaagggtttggtggtattttgagttgttttggttatttggatatatgtttagaaatgacgtagagatttatttttgtaagttgtgtttagtgttttgttggtgttggtttagtttgttatatttgtaggttggaggttaggtgtttttagttggtagtgacgggttttgagtttttttttggttattatttattttgttatcgtgtagttttatgtgagtgttttaataattgtttagtaagttattttttttttttttgatga

SEQ ID NO: 229 - DNA, 1508 bp, Artificial Sequence
  chemically treated genomic DNA (Homo sapiens)
attttataattataaatatttagtgtattttgtaaatatggtataatttgttggtataaaattttattgttttagaaaatatcggtaataaaattatagaaaagttaaagatttttattttttatttcgaagcgtttgggagatattttagaaacggatgggaaatgttaaattttgtatgtttgtttatttttttttttatatcgattagatgtaaacgagtgttattaaaagtatattataggtatttatatagattttttttataagggatttataaagtttagatgtgaaatgtattttaaagggtttttagtcgttttttatttttttttttgtgaaatagggaagatatatgtgtttttaagggtagagatggaatttgggttaatgggtcggggggtggggggaagttggaagggattgttttaggatatggtaggatagtggattgtttttgtcgttttgttgtttatatcggggttttttgtaggcgcgtcggttttttttttttttgttgagaagaagttttgttaaaatattcgtttttttcgggaattttttcgtgggtttaaagcgggaaaatgttgttttaggtttaaaataatttgtttaagttttttagcgcgggagaaacgtttttattcgttttttgttttcgggggtgtttttcgttttttgttgttagaattttggggagtgtttagattcggggtagtatacgttcgggttaatcgcgagtagaataaatttttggtgggcggttaggaagtttttttttagttatcgtttttttttagtgtttttttttttttttatataatataagattttttttttttagtttttttaaagtatagtttaaggaaatttttttatagtttttatttagttacgggttagtatgtttgggggtaaatacgtagattcggaggtaggtattcgtgggggggcgtcggttcgggcgtgcggggaagtgttcgtttttgttatttgtttttttaaatatttcgattgttgatttggttttttagttttttttttatttcggagtatttttttggcgttggtatcgttgaagaatgggtttgggcggggaggtgaagagaagttaggaatgttttatgtttttttaatggagagggggtttcgggagtttttgagttaggaggatacggaaaaggggattggggttttgagattgggtttgttgggtttaagacgcgttttttggatgggtttaggatgtttttttgtcgcgggaatttcgcggttcggttttgtttgttgggggttcgaaaaagtggattgtagggtggaaggtgttatttattcgagttttggggatagttttcgggatttttcgttaagcgtttaaaacggtaggtttttaagcggcgcgcggtgtttttgtattttttaaaatttttgaaatattttaaaaatttttttgtattttggcgtttggtagggttttttaaaaaaagtaaattttttttttaaatgta

SEQ ID NO: 230 - DNA, 1508 bp, Artificial Sequence
  chemically treated genomic DNA (Homo sapiens)
tgtatttgggagggaggtttattttttttggaaaattttgttagacgttaagatgtagaaggatttttgagatgttttaagaattttggaaagtgtaaaaatatcgcgcgtcgtttggggatttgtcgttttgggcgtttggcggagagtttcggggattgtttttaggattcgggtaaataatattttttattttgtaatttattttttcgaatttttagtaggtagggtcggatcgcggggttttcgcgataggggagtattttagatttatttagaaaacgcgttttgggtttaatagatttaattttaggattttaattttttttttcgtgtttttttagtttaggggttttcgaggttttttttttattaggaaaatataaaatatttttggtttttttttattttttcgtttaggtttattttttagcggtgttaacgttagaggagtgtttcgaagtggaaagagggttggggggttagattagtagtcgggatatttggagaggtagatagtagaagcggatattttttcgtacgttcgagtcggcgtttttttacggatgtttattttcgagtttacgtatttgtttttagatatgttggttcgtggttggatgaaaattgtgaggaggtttttttgggttgtgttttaagggaattgaggaaggaagattttgtattgtatggggggaaaaaaaggtattggaggggggcggtggttgggagggagttttttggtcgtttattaaaggtttgttttgttcgcggttggttcggacgtgtgttgtttcgggtttaggtattttttaaggttttggtagtagagggcggggagtattttcgggggtagagagcgagtaagaacgtttttttcgcgttggggggtttggatagattattttaaatttgaggtaatattttttcgttttgaatttacgggggggttttcgggggaggcggatgttttggtagggtttttttttagtagggggggagggagtcgacgcgtttgtagagagtttcggtatgggtaataaggcggtagaaataatttattattttgttatgttttaaggtagttttttttaatttttttttatttttcggtttattggtttaagttttatttttgtttttgaaaatatatgtgttttttttgttttatagagggagggatgagagacggttaggaattttttagggtatattttatatttaaattttgtggattttttatggaaggaatttgtgtgggtgtttgtggtgtatttttggtgatattcgtttatatttagtcggtgtggaaagaaaaataagtaggtatgtagaatttaatattttttattcgtttttgaaatgttttttaaacgtttcgaaataagaaatgaagatttttaatttttttataattttattatcgatattttttggaataatggaattttatgttaataggttatgttatatttgtaaaatatattaaatgtttataattgtagaat

SEQ ID NO: 231 - DNA, 1984 bp, Artificial Sequence
  chemically treated genomic DNA (Homo sapiens)
  unsure (9, 17, 18, 33, 41, 49, 50, 52, 54, 62, 80, 84, 127, 157, 159): unknown base
  unsure (175, 207..209, 214, 1181): unknown base
agttttagntattattnntatttttattaatgnttttgggnttataggnngngnttttttgnttaaatagtagttaatgnaggnattttaaaaggtatattattttatatttatttagtggttatgntattatttaatttttattataattttgtgngnttagtataatttgtgnttttattttatttgtgaataaatggaggtagnnntttgngtaatttataagtaagtggtagattcgggggttgtgtttagataatgtggttttagattttttgtttttttttgttttttgttgtattttgattgagtttagttatttatttttttaatatatattaattgttgtttttatgttttaggttttgtgttagatgttagaaatatatttttatttattggattttggtatggtttattgtttagtgttttgttatgttacgtgttatataatgtatttatttcggtatttagtttatggaaaataatgttgaaagatattgtatgtatgtttttataataaaattatgtaatttatgttttttttattgttttggttattaggaagtttttatttaaattagagtaaatatattagaatttgggtttgttattttagtttgttgaatttttttttttggtttagattttttattttggtttataaattttattgtataaatgttttttattgtaaaatattttaaattttttttaagggaaggttgtatggaaatgatatagtaaggttttttttgtatttttttagatttttattagggaaggtagatttagatgttttttttatttttagttttaaagttttttatttataaaattttttaagtagtgattattgttgttttgagtatttggaggtagtttagagtttttgaaaggtaaaatttatatataaaaagaagtttttttcgatttagattttagttttggtgttagatgtatatttgaggagtaggtggttagttagatttttatttgagtagttaataaaatttattgttttttaatggaattttttttgtaagttcgaattgatttgttatttttgtgatttgtgagatggtagggaagtattaaatattattatgatttgggttatagtggtgggaaaaaaggaaaaaagaaaaaaaaaatttattgttaagttttgttaggcgtanaaagggttggaattgttggggttattttatttgatttattggaaatagagtggattttattaatattttaataaagagaatttttttgtattaggttggaagtggtcgttagtttttcgtgtaattttattttttggaaaagtggaattagttggtattgtttagcgtgatttgtgaggttgagttttaatagtttaaagaagtaaatgggatgttattttcgcggggttcgtttttcgcgaggtgtttatttcgtatttgttatgtaaaacgagggagcgttaggaaggaattcgttttgtaaagttattggttttggttattagtttttatttaatgttttcgtgatgttgttgttgatttatttgggaagttggttggttggcgaggtagagtttttttttaaagtttggtttttacggaaaatatgtttagtgtagtcgcgtgtatgaatgaaaacgtcgtcgggcgtttttagtcggataaaatgtagtcgagaatttcgttcgttttgtgcgtttttttgttttaggtagggaagaggggttgtcgggcgcgttttgcgtttcgtttttgtattcggatcgttcggtacgggtagggtgagggggttttcggggggtcggggttttcggtcgcggcggcgaagatagatcggggttcggtagggaggttatttcgagtttagagattttaggtattttttatatataggtttttattttggcgtgcgtgcgtgtgtgtgtgtgtgtgtgtgtgtgtgtgtgtgtgtgtgtgtgtgtgtacgttcgttaacgggagga

SEQ ID NO: 232 - DNA, 1984 bp, Artificial Sequence
  chemically treated genomic DNA (Homo sapiens)
  unsure (804, 1771, 1776..1778, 1810, 1826, 1828, 1858, 1901, 1905): unknown base
  unsure (1923, 1931, 1933, 1935, 1936, 1944, 1952, 1967, 1968, 1976): unknown base
ttttttcgttaacgaacgtatatatatatatatatatatatatatatatatatatatatatatatacgtacgtacgttagagtgggagtttgtgtgtggggggtgtttaggatttttgggttcggaatgatttttttatcgagtttcgatttgttttcgtcgtcgcgatcggaggtttcgatttttcgaaagtttttttattttgttcgtgtcgggcgattcgaatgtagaaacggggcgtagagcgcgttcggtagttttttttttttatttgggataggagaacgtatagaacgagcggagttttcggttgtattttgttcgattagaagcgttcggcggcgtttttatttatgtacgcggttgtattgagtatatttttcgtgggagttaggttttgaggagaggttttgtttcgttagttagttaattttttaaatagattagtagtagtattacgaaagtattgggtagaggttgatgattaggattaatggttttataagacggatttttttttaacgttttttcgttttgtatggtagatacggggtgagtatttcgcgaggagcgagtttcgcggaggtggtattttatttgtttttttggattgttggggtttagttttataaattacgttgggtaatgttagttgattttatttttttagagaatggaattgtacgggggattggcggttatttttagtttagtgtaaaaagattttttttattaaaatgttaataagatttattttatttttaataaattagataaaatggttttagtagttttagttttttntacgtttggtaaggtttggtagtggattttttttttttttttttttttttttttattattgtggtttaagttatgatggtgtttggtgtttttttgttattttataaattataaagatgatagattaattcgagtttgtagaaaaaattttattaaggggtaatagattttattaattgtttaggtgagagtttgattagttatttattttttaaatgtgtatttggtattaaagttgggatttggatcggaaggaatttttttttgtatatggattttattttttagaagttttgaattatttttaggtatttagaatagtagtagttattgtttaagggattttataaatggggggttttgggattgagggtaagagggatatttaggtttgttttttttaataggaatttaagaaaatgtagggaagattttattgtattatttttatgtagtttttttttagaaagaatttaaggtgttttataataaaggatatttgtgtaatagaatttatgaattaaaatagaaaatttgggttagaaggaaaagtttagtaaattgaaatgataagtttaaattttaatgtatttgttttgatttggataagagttttttgatagttaaagtaataaaagaaatataagttatatagttttgttgtagaaatatgtatataatgttttttagtattattttttatgggttaaatatcggaataaatgtattatgtaatacgtaatatagtaggatattgagtaatggattatgttaagatttagtggatggggatgtatttttagtatttggtatagggtttggaatatggagatagtaattagtgtgtgttaaagaaatagatggttagatttaattaagatgtagtagaaggtagggaggggtaaggagtttggagttatattgtttaggtatagttttcggatttgttatttatttgtaaattatntaaannnttgtttttatttgtttatagataaaatgaaantataaattgtattgantntataaggttgtggtgaggattaagtgatgntataattattgaataaatataaagtgatgtgttttttaagatntttntattggttgttgtttggntagaaggntntnntttgtggntttaaggntattgataaagatgnnagtgatgnttgaagtt

SEQ ID NO: 233 - DNA, 17897 bp, Artificial Sequence
  chemically treated genomic DNA (Homo sapiens)
atattgtataattttttatttatgtttaaagtaaaggatttattatatattttgaatatagtttattttttatttttatttggaattgttttttttttatggttttttttttttttaatttttattgtttataatatgatattataggttaggtatgtttgtagataattgggataatttatttttatttaagtaaaaattttagatggtagtttttttatttgggattatgaagtaggtaggattttttttttttttttaatagagtttaagtagtaagatcgaataagatgggatgaatttaaagagaaatatttgtatttgtttagttttttaattaatatttattgaatttttttacggttaggtgtgtaagatgttaggagggatgagataagatgatgatgatgatgatgatgatgatgatgatggtgatgatgatagtgaggatgagggtgaatattttaatgagagttttttatatgttagggattgttttaggtattttatatatattaatatatatatttattataatgattttgtattgttatgtgtattttatatatgaggaggtagaggaaggaaatgaaataatttgtttaagagtatagagtttgtaagtggtaaagataagatagaaataattttttaagagtagagagtggtgatttttggggatagggaagtggaaaagtggggagataaaggttgttgttttttttaataagttttgaagatttatttgattaggtttaagaaaaatttgataattattataaagtaaaaggaagaggagatgaggtgggtttttgggtatagatgtttgttttggaaagtttagggaggaaggggtgagaggaattgggttgtagtataggaatgggggatttgggaattagaggggattggttagggtgggttattgattgtagtgaatgtttatttgttgattgggttgtagtataggagtggggggtttggaattaagaggggattggtttagggtgggttattgattgtagtgaatatttatttgttgattagtttgatttagaagaaagggagagatggatgttggaggagagagggggtttcgagggagtttaggattggaggtgggaagatatttttacggatatttttttattttgatagatagaaaagatgatggtttgtagtagtagatttataaattgtgattgaaaggtttgatggttttttttattcgttttttttatgtatagagaggtggagtaatttgttttaggtattatagtttataagtggtgaagttggagttgggggttatagattatcgggtttttttttatgaatttttgttgtattttggttttttttaatttcgagtatttatgagttttaagaaagatagttgggaataggtgatttttatggttatttttggaatatttggttagaatattttagtataaaatttaagttgttgttaagtagaaatttttagtggatattagtttagaaaatttaattttattttgtgacggatttgtagcgcgtgtgtatttattaagtaaatttgattttattgttgattagcgagaaagaggaataatgtaaatagttagtgtaattgtatttatatttagtttcgtgagtttttgttattttagttggttgcggtgggggatgtggaggtgtatgtagtttttaggttttagtgaggggtttttgtatagggtgggcgttttttatgttttatgtgtatttaggtttgtattaaagatagttttttttttgtagcgtgatatttagttaagaaaattattttatttggtgtttagcggaagaaaatattttttttaatagggaaggaaaattggttgtgttgggttgagggaggggagtgtggaatttaaatggtgttttttttaggttttttttaaggtgatgtggattttgattttagaatgttattatttggaaaattgtgttttattgtttaaatttttgttttttttttttgtttttttttttttattttatttttttttttttgttttttgatttatttaatgttaatggttttttagaaggttaggttttttatataagtttagttttttgttaggtaattttttcggggttttaagttgtaaatttgggttgtttttcgtattttgttttgaggatttttttaaagagataggtaagggttttttttggtaaaatgtttttttaattttatgtattagttttatttgttattgaagaagtgggtcgttttttttgcgtttttgaatttgatattttttattttgatatttcgtatttttgaatttgatatttttgtatttttagtaggtaaaaaattaaaggtgtttatttaataaatcgtcgtaatggggagtttatgggaaaatgggtatgtgtaagttggttaaaggataataggtatataggttgtttgatttgggagggtttttagatagtaggatggtttttagagatgtatttttgttgttgttgttgtttatgattatgtttttagggtttagaatggtgtttgggtatagtaggtttttaatatagttagggaatgaatgagtttattttaattacgttgtatggatggagaaattgcgttttggggttgtattatgttatgtatttgtagaaaatgtttttgtttttttagtttttttttagtggcggagtataggatttagtttataagagtagtttaattttgttatttgtggaatgatagaataaataagttttagggtttagggaggtaaggtttttgttttagttttttaagtagttggaattatagttgtatgttattaagtttatttgattttttatttttttgtagagatgatgttttattatgttgtttagatttttttggaatttttgggtttaagtaatttttttatttttgtttttgaagtagttgggattataggtatttgttattaggtttggttagtttttattttttttgtagagatgggatattattatgttgtgaaggttggttttaaatttttggatttaagagaggtttttgtattggttttttaaagtgttgggattataggtgtaagttattttatttggatataatattttatttgaaataagaaaaatttttttttattgggaatgttgtagttgaattagtttaaatttataaagaatggaagattgtttagtggttatttatttatttattaattttagatgttaaattttttagggtgggggaatgtgtttttatatttaaggtatttttgaatgtagttaaattttgtagtttagttaaattttatagttaatagttaaattttgtagtttagttaaatttttttagtagtaaaatttatgatattggaattttgttttttatattggttatttgtaatagaataatagagttttagtattagataggttttgaaagattattgaatttaattttttttttttgttagtgagaattttgaagtttagatttgttgatttgtgatcgatagtgttaaagataggtttgaaatatagatgttttgggttttagaggtgttgtttgtttttttttatattttttttgttttagaaaatttttttttaaaattggttttaataattagaggggaaagttatggtttttgttttggggatagtatgggttggtatagaaaagaggtttataatttagtaggaagtgttgtgcgtgcgcgcgtgtgtgtttgtggaggcgtagggagggttatttgagtttgttttgggtttggttttgggtttagtggtaaatttaacgttgggtaggtggtttgaggataatgacggtgttagttgtgagttagattttttttatttataaaattatgtttttttatgtagtgttttttaatttggttgtacgttaggagttatttgggtagttttgtaaaaattttaatgtttagttggtttgtattttttgagattttgattaaattgttttggagtttatttttttttttttattatttatttatttatttattttttaatttggcggtttttttgggattttttatatgtagtaggggttgagaattgttggtttttttggttagatgggaatatgtaggttaatagttacgtataaatagagtagtagagtaggacggtgttaaggttggaaagggtgagttatgaaagtttaggaaattagaataggaaggggtgagaatttttttatttgggtttgtggggtaggagagaagagtttagtgggtaaggtttagtgagtgtgtttagaattgggaagatgaggggaagggtaagcgttgggcggcggtgggtaagatggacgagattaaacgggagcgaggattttagcgagagttttggcgatacggaaggttgagaatcggagggagtttgtcgggcgaaagcgaaggcggttgttgggtaggtagtcgaattcggttggagagtcgagttggtgagatttataggaagtgaagggagtcgtttagggcgtggcgtaacgagatttttagaagaaattttgaggtagagatggggggttttcgtttatacggagatataaggaagtttatatgtatacgtacgagcgcgtatatgaatacgtataagtatataaacgtttttttcgggtagggtatacgcgttcgttgtataggtcgaggttttggattcggaggggattgtagagtcgatttataattcgggtttcgatgtttttttcggtcgcgtttttacgattgtttgcgtaataggcggcggttttagtgggcgttcgtcgcgcgttgtcggagtttagtttagttcggcgcgttcgggaggagggagtagggagcggggaaggggtgtgtttcggttgcgtgttgggattgcgagggtttgggaggggcgaggcgcgggggcggggtcgcggcgtttataaagtcgtttttcgttcggacgtaaataaatttcgtttggtttttagttggtgttgaagttcgttagtttattattcgttttcggttttcgcggggcgttgggtcgttagtttcggtatcgtttttttttttttttttcgcgttaggtaagttcgcgttttttttttttaggcgcgacgcggagtagaaaggggtcgttcgtgcggtgtcgttggagcgttaggatcgttttttgtagtttcgcgtattttaggagtaagcgtttcggagttgtaagtgcgcggttatttcggggcgcgggcgcgagggggttttgggtgtagatatcgttgaagtggggggtttaattacggaaagggaggaaaaaaagatagggttttatttattttttttttagttggggattggggttttggaggtcgggaagggggcgatgagacggttcgaaaaaatattaggatagcgttttttggcgtcgttttcgaattttagttggcgtcgttggtaggggtgcgcgttggacgtgggtgtagaagggattaggtgagtgtgtgtgtgtgtgtgtgtgtgtgtgtgtgtgtgtgtttgtgtttgggaacggagagattgcgcgcgagtgtgtagatgaggggttggtagaggtgagtggcgttggtaaggaggttggagaggggggcgtgggtgtgtttggtttgtagattgggtcgggaacgggtgtggattcgagaggttggtggcgttttagtttcgtagtatatatagggcggtgtgtatgtgtgagtgtaagcgtgtgtgtggggggagggtttagggtgtgttatagtgtaatacgcgagtcggagtaagtgtttgcgagcgttattgggtagggtgcgttttcggaggaattcgggattggcgtatcggcggcgtgggagaagtgatttgggcgagaggggtttcgcggatatttggcggttttttgagttggttggagttaggagtggcgttattttcgttttcgtttattttttttcgtttttttttttttttttgtttttggtgttggtcgtttttgttttttacgggggaaaatagttggaattatttcgacgtttttgggggattcgtcgcggtttttgatttagtttcgggaggagatttcgggttgggtttggggaatgcggttggttttgggggaaatacgttgttacgtttttgttaaattagtagttggagttgggatttagtgggtcggttttttatttattttttttttatatttttcgtttgttgtttttgttgtttttgggggttttgaatagtacgtttttgtggtttggaagtgggagatgtttggtagtgggtgggggaggtagggtttttggttattttatgtttatttaagaatattttttttttacggacgttgggggtattttagtttgtttggtttttttaagttattgggaaatatttaatatttagaagttagttagtggttaggtaggagggcggtagatatttttataatatttattagttgtacgggatttttttttaagttgttttaaaagaatatatttaaatataaattttttgtttttgttgtagaaatgtagttttaaggcgaattttttagtttagattttttttgttgagaaattttggcgtttttattgagttttataaatgtgattgaaataagtaaggtatagagggggtaaattttagcgttttttttggaagggttgttttttggtggggaagatatacggttggagacgtagatcggttttgtgtggtgtgtgtggcggtagagttagttttaggttggggtggtatagtgtcggggatgaaggaaggtgtaagggagagagagggttttggtgtggatggaaaattgggtgtttttttgatttgtgattttttagttttgtgggatcgtgttttttattgtatttgggtaaggaggaggatttgtttgttttgttttgtaatttggtttttggtttagcgtttggtaggtgggaggagttgaaatatgtatatgggatgaagtggatggttttgggttttttgttttatttttttgtgaattagtaggttgagtttcgggcgaggtaatagattgtgtatgggtggaggtgttggtttttgtttttgagggattttggagtgtttgtttgggttttttgtgaggaagtttttttggagtaataaagtttgattatttggaatggaataaaaaatttatataggatttatttagtttaatttttttttattttatagatggaaaatgaggtatagggatggggagggatgtgtttaggtcgaattgagttggagtttagttttgtgagaggtttttgggtgggattgaaggtagtggaaagggtttttggtaggattttgtttgtttgttatggaggggcgaaaggaaattgtatttttattgaatttttggtgaggaaatttttgaggttaaaggggtagagcggaatgattttttttaagtgtaaattaggtgtttttgagagattagtaaagttagtttgaagggtaggggtttagaggttgtagttttttgagttggtttttgattgaatggggttgttttttttttatgatagaagatagattttaattgagttgagggtttttttgggttacgttgaaattcgttggtttgaatttgtttttttatggatttgaaagaaagatagtattgtgtttttcgggtggtttaaagttgtagtttttttttgggatttaattttagagaattttattttagatgtgatttagaggttttgttttgggagagaaagcgtgatgatttagtatttgagatttaagtagggtttaggtttgatttagtttggaaggaaggttagggagggatacgatatttttttttttttagagtagttattgtttttttttatttgtttttattttcgtaagaacgttgtttggatcgtattgttttattgaatggatgaggtaattgaggttaggagagttttaggatttgtttgttgttatatggtttaggtgggagagttagattttgaattcggatagttggattttagagtttttgttttttttttatgataatatgttggggcgtttgaagaaattaggtttaaatgaaaaggtagttaggagttttatgttttagtttgtttttttgtaaaatgagagtaatagatatgatgttattagaatgtgtaaatattaatttgtgtaatttgagaatagtattgagtatgtggaaaatagcgtgtaggtgtttgtcgttagtagtattcgtagaagatatttttaaggtatttttttggtaggtagagtttgggattttttgttttaaatttatttaaggttgtgaaagtgtttgtaaatgtttgatttaggtattgttttttgttaagtttatgtaggttgtataatagtgttatgaaaattttgtttgaaatgtatatttttaggttcggttttttgcgattttttttttattaggggatatgttgttgttttaaagtttttttggttgggttgggaatggggtattttgtaggtagatagagttgagaatttttgttttggaatgataggggagagaagaaggaaggtgtagttatatatgtcgttgtatttttaggttattttgtgtttatagtgttagggaattagtgagtgtttagtaaatagtttttgtttgttatagtgttttggaggtttaatgtattatattagttaattgaggtagaagatattttttttattttttaggttagaaaattgaggtttaggttggtgatttttttgtttagagtttagtgagtggggttttgtttaaggtgagttttttgagttttttttattttttaatattgcgtttggaggttatttatattttttgggtttattttttgagaaggagtttgttttttggatttattttaggttgttgtttttgttttttttgatggttgtgtgatggaagtatcgcgtgtttatttgttttttattttttaatttggagatagaggtaggttagatagcggttttggttgagaatttagtttaggtaggtaggtagaagggttggggatattgaggttttataggaaggcggttgtagaggtagagggttatgagtaggtgttaatttggagtcgtgttttcggggtgggggttatgtgaaaagaaatttgggttttttcgggtggggcgtaagttttagtattatagaatgggaatggattatataatcggggttataagtaggtttttttgatttagatttttgatttttttatttaatattgtttgtagatttgtttatgttttatttgtttgggttttatttttgattttttgagtttagcgggtttttttgtaattgagttggtagaaagtgaggttttttaatagtttgggggttttgagtgttttttttagtagtttaattttttttttttttaaatttgtggggagattttttgtagttatatattttaaatttgtatagagttttgtttgaagagaggtgggtgggggtttaggtttttattttgtttttttgtttttattttttgttttatttttacggaatttaagaagattttaagtaattttttttaaatatggatgtgagagggttatttaagaggtgggtttatggttttttttagttgggaatgtttattatttttttttttttttttttaattatggaattttttttttttttttagaaaggtttttttggttgttttttgttggaggggaggttgggttgggttttttttgggatttgtttatgttttttatgaaatttgagagtttgtttttagtaggtgttgtgttagtggtggtggaaaggatatttttattgattaaggaagtaatttggattattttgtatagataagatcggaggtttatttcggagggtggaaattgtaagattattttggggaaggattttgttagcgtggttagtattttatttcgggataaagggttttgtatgaggaagttattttttcgttttttgttaatattggtttcgtttgtgtgatttttataaattattttagattatttagcgtagtttatgtttgttttgtaattttataaaataattttttaaggagattagtgtttttttttggatttttagttatttatttcgtttttttagacggtcgttttttgtttgttaaataaattattcgtgttgttaaaattttattgagaatttttaggaagatttcggttgtattgtagaaaagaggtgggttttgacgagatttttgatatttttttttttttgttgttgtgtttgggatatttttgttgatttttttggtgttgtgtttaagttgaatatatagtagtttagttttagttttagtttttttggatttatatttagggagtgaatgcggttttggtttgtttgagagggagatagtggggtttatttttttagtgattttttttttattttttgaatattaaatattattgatgttttttgggttttaggttttattgtaaagtataggggttttcgaggagtttttattgtggttttgttttttgatatttgtattgtttttttgattttgattgttttgatatagttttttaatttttaaattagggaatttttttgaaggtttagtgaatttatttatattgtttgttgagttgattagttaagaaagatagttcgtgaagattgttaatttttttattttttttagggttttgagttttagaagggttagaaaatattaagagagtttatgaattgttttgtagtttgattttaaaatttttttgggtaaagaaatgataaaggattgtatttatagtaaggtagggttatttagggtttattttaaggtggttttttttgaggtttaggtagaaatggtgttgttttcggtaattttttggggaagttgttatagtaaatagttatagtatatgttgattttttttttttttttaaaaatttgttttataaagagtataatgtgttggagagaatattggtttttatgtggttttaaaattaggtatgttatagagggtggaatttgggttagttgttgttggtgataatcgatgttatttttgttagtaattttcgtttgttttttttttatttgttttattgaaggtttttaggggattgttgttcgttttttttcgagggaatgagtgttatatttgtatttataataaattagtgagttttttattttttttttagtagggaggaatttagatatgtggtttttggaagttaagtgggtttttgtgtttgtttttgagttttaggttatttatttgtgaattgggtataatatttagtttttttcggggtaatttttttgaggagtaagtgaaatagtgtgttgagtgaatgtttttttaaagtattgagttggtcgttttaggaaggtattatgggggagttgaaaatagagaattttttgggtgttgtgaagggagaaaagtttaagatgttggttttgttaaaagtttaagtttgtttatgatggtttagtggtgattgtagggtggaggagaggtatgtgattgttttagttgatttttatacgttgaaagttttatggttacgtgtagtttattttataacgttgtatttgggttacgggtggtggtgaggattgtggatatatttagggtaatgtgagattattgttaatattttttttaaggttgttttaattttaaagtagttagtttgatgtttgttgatttggggtatatattttaattttttgatgttttagttttttcgtttgttaaatggtgatatgttggtattttttttttagggtttttgtgaggtttaaaggaagtatcgggtttagagtttagttagtgttatagatattgtttttggtgttgtttttgtggtgtgtttgtgtagggttatattgttgtttttttgtggttgttttttttggtgggcggaatttggaatttttagaatagattatggatgtttttttgttggatatttttttagttttattttgtgggagttgtggcggggtttaggagagtttgtttaagagggtgtgtaggtgggtggtagagttggagtaaggtattagttttaatagataggagtttgaggttggtagaagtgggggttttggtttaaggtgcggggttaatttggttagagttgagtttggtagggttttggtaagattttgtggtttttttgttttggtgaagtatttttttgtttgggtttttatttgtttgtaagtttgttgtggatagcgtgatttttatagacgtatattgtgtttattttatagatggagaaattaaggtttagagaggaagtgatttgtttagagttatggaataggaaagtggtagggtttttatgttttgatttttaggttagcgtttttgttgttttattgaggtttttgggaattataggttttgtgtgttttttttagttttttaggggttgttgaatagtttttaagtggtgtcggattattgaagatgtttttgtttattgtttttttaggttttagggttacgggttacgtttttttttttttcgggtagattttggttttggttttgtttggtatttgtgatttagtttttttttgatttttttgggtttgttggattggaagggtatttgtgtagttttttttgggtttttattatttattgatagatagtgttggtggagagaagggttttagtggtgacgtattgggtttgataattagaaattttggtggtatttgttgagtattttttatgtgttttttttttcgttgggattttaggattgaaatttaggttatatttttatagatgttttggtatttttaaggtaattttgaaaggaaagtatgttgatgaattaagtaattgtttgtttaattttttatgttatttttgaatttaagttttattgttgattattgggagtaggagttagtatgtttattgatagataagtaaattgaggtaaagaggttagatagttaggtatggtggtatatgtttgtaattttagttatttaggaggtcggagtaggaggattatttgaatttaggagtttgagattagtttgggtaatatagtaagattttgtttttttaaaaaataagatgaataatatatttttaaaaagagattcgataaattatgtaggattatagagttaataaatggtgatattatggtttgtaagtttttttttagtttttggttatttttcgtttttttggtattggttttttcggaattttttttaggtaggtggatgggaaaagaagtgaagatataggttggtagttggtgttgtgatttggagttttgtttttggtgttaagttgggttttagttgaaggagatttgttggaggggttttttttgtgttttttggggagtaaagatggttttggagatggagatacggtttgttagttttaagttattttaaaggtggggttggtgggttaggagttagttttggttttttcgttatgttgtgtgtggttttgttttgttattttatttgttggaggatttttttgatgttttttagtgggttttaatattttgtgattaggattttgtatgaggtagagggagggtaggagttggagtttagtaaggattttaagtttagggataggttttatttgttatatttgttaagtcgtgagggttttaggtgttcgggaggagggagtaggagtggaagtattagttcgagtcgttaaattaggttacgtattatttgttattttttgttggtagaaggagattatagatattagaagatagtagtttttgttagaattgggtttttttatgatttttaggtggtgattttgaattttagaaaaagtgttttggggagagtggagtgaaggaagagtgtgaatattggatttgattttattttagtttttgtgttgtagttagtagggtgagtttaggatagttggtagtcgtttgggtttagttttttttttcgtgaatgaaggtggtggggagtgtacgtgtgcgtgtgagtgcgtgtgagtataaatgattgtggatgtgagagtttatgaaagtgagaatgtattagtgtgtaagaaagtgtgagtatgtgagaatgagtgtgtttgtgagaatgtatgtatgtgtgagtataagtgtgtgaatgtgagaatgtttgagtgtgagaatgaaagtttgtaagtgtgttagtgtgagggaatgtgtgagtgtatttgagagtgtgtgtgtgtgtgtgtgcgtgtgtgtacgtatgtattagattaaataagaatgtatttaattgatattttttggatattgttatttattaggaattattaaaattagttattttagaggagggtggatgtcgtattaggggatatttggtaacgtttgtagatttttttgttggtcgtagcgtggggtgtatgttgtgggtatgtggtgggtagaggttagggatgttgttgagttttttttcgtgtttagggtagtttttaaggtagaggttgtttgtggggtttaaatgttagtagtgttgagttgaggatttttgtttaggaggtatagacgttgttttggatgttgtttagatagtatttgttttgttttttagggggatagatagatagtggatatagtttagatgtagtttgatgagtgagtttaagggagtgtttgttttttcgggattgtgagtttcgtgggggtaggaattgggtttgtttgtttatgatttttagatgagttttatagttagttttattattatagttggtgttatttttgttttgagttttgtgttgggtatatagaatttagtgggtagaaatttttgaataaattttgagttttttattttgttttcgtgaatttagatgttttttgagggttagtttggtggcgtgggggttgggagtgggtagattgtagggagttaagttttggggtggagtggggtttaggtttttttttttggtttgagtcgaagtattttggttttttaaattttaaaatttttattttttaatatttttatatgttgaatttttttatatgattttttttggataaaagtttttgtaaaaaaagtttgaaaagttttttggttgaggtattagggataaggtaagggttgtttgatgggtttaattcgggagaattgaggtgagggagtcgttttttttttattttataggttggttagatggtggatcgttagtagttggttgggttaatttgtagagagtattttttgtagtttttggtttatgcggttttagtattgtaggacgcgattaatatgtaggttatttcgaggtttgtagtttttatagtttttttagattagtgtaaagttttatttagtttttcggtagattttagagtttaggatattttttaaatggtttaaaattaatggaattatttgggggataataaataatgttattagatattgttaaatgttttttgggagagaaaattttttttagtttagatatatttcgtgattatttttagtagttttatttttggattttttaaaggtttttagtagtgagggggttgggttagagaaggttttattagtttttaaaagtagatgtttaagaatttgatatttttaggatatatagcgatttttttaatttattgttttatgtggtttgggaagttaagttgtaggaataaaaaaggtgtcgggtagggtaaagaggttttattagatagaggaaacggggaaggtggatatttttgttttttttgttttggagaacgagagagttggtggagattgatagatattatgttttaatgtgattacggtttttggaagttaaagagaattgattaaattgggttgaattatagtatttttcgagtttttttaaatgtagaatttgttttttagatattgtatttttggggtttagtaatgatttaaaagtgaattttattgaaagtatgttgttgagttatattgtttatttatttagagagggagttgtagtttgattttttgtttaggagagtttttcgtgttgggagttagaggtagagaaaagaataagttatttgtttgatgaagtttatagataggattgtttgaatttatttggtgggatagtgagagttttttgattttattttggcgcgttttgttgagtagggtatgttaagaagtttttgtgaaatgagaagtttttttatttttagaatgaggggtggcgttggtagggttttgggtttttggaaggttttttaggttatgtaggcgaggtgttttataggttagggttttgggattacgaatttgttgaattagtaaggttaatagacgcgggttttttatgttttttgtttttaagttggtagttgtttaggaatgtttataaatataaaatcgattttgtttttagaatgttttggagtatagattttaaagtttgtataaagttatttttgtggggttggttatttattggggaaaattatgttggggttttagattagagtattttagtggagagtaggatttgtttacggaatgttatgtgttggtataagggatggattcggggtggattcggggtggttcgtatttgtcggttgatttttaagaggtgttttattaggtttttgggagtttttgggtttttagaggagttttaggtaggaattttagaggtttgtattttttcgattattgtattcgaggggttttgggtagtgcggggtttaggtttttattttgaagttggttgtgtgagggttttggttaggcgttttttatttagaaagtttggatttgtgaattgggtgggtggtttgggttttttttttttgttatttatttttttttcgtcggttttttgttgttgtttgtaagatttgattttattttgtattttttatgttttattttagggattgatgggtatttagtttttttaatttgattattgatttagaagaatatatgtttatatttttggtttttagatttagtttttggaggtatgtttaatagatagtattatttgtttaagttttgtattttagggagttagtggtagtattttaagtttttttgggttgtgttttagtttggttttgtagtttatatttttgtatttgttttgtgttagagtataggtaatttttttggtttattttttgttttgatttaggaagtgttttttgttttggaggtttttttttttataaaattgtattgtgcgtttaaatgtttgttaaattttttgatttaaggtttttttttgtttttttttttttttagtaggtagtcgagagttttgtatcgtggggtgtgtatgtgtgtttacgcgtatgcgtgtgtttgtgtgtttgtgcgtttgtattattaattttttgttagggttaattgtgaggttgaagtttgtattatgtttatacgtggtaagtatcgtgtgagtttgtgttttttttttattgttatacgggggttgtttgattttgggattagtaatgtaggtttttttttagaatgtagtgagttgtattttgggtatggtgggtgggtttgaatttggtatggggatttgtttgtgaggttgatttatttattttattgggagggtggtgtttgtgagttttagtatttttttttaggaaatttattgcgttggttttaatgggaagattgggttgggtttatgggttgtgtgtataagggatttttttattttttgtagtgtattacgagggaggtgaagttgttgggtagagcgtaggtttggtttttttgttattggttttggatttgttttttttaggaaattttttagtaggaagtgttgattttttggtttttgtttttttgtagg

SEQ ID NO: 234 - DNA, 17897 bp, Artificial Sequence
  chemically treated genomic DNA (Homo sapiens)
tttgtaaggagataaaggttaaaaggttaatattttttgttgagaggttttttaaaggaagtaaatttaagattaatggtaagaaggttaggtttgcgttttgtttagtagttttatttttttcgtgatgtattgtaggggatgaggaggttttttgtatatatagtttatggatttaatttagtttttttattggggttagcgtagtggattttttgggagaggatattgaggtttatagatattatttttttaatgaaatggatagattagttttataaataggtttttatattaagtttaggtttatttattatatttaggatgtagtttattgtattttagaaggggatttgtattgttgattttaaagttaggtagttttcgtgtgataatgaaaggggaatataagtttatacgatgtttattacgtataggtatagtgtaagttttagttttatagttagttttaatagaaggttggtgatgtagacgtatagatatataggtatacgtatgcgcgtgaatatatatatatattttacggtgtaggattttcggttgtttgttaaaagggaagaggggtagaggaaaattttaagttaaggagtttggtaggtatttgaacgtatagtataattttgtaagaaaaaagatttttaaggtagaaagtattttttggattaaagtaggggatggattagaggggttatttgtgttttaatatagggtaggtgtagaagtgtgggttgtaaaattagattgaagtatagtttaggaagatttggaatgttgttattgattttttggggtgtaaggtttgggtaggtggtgttatttattaagtatgtttttaagagttgaatttagaaattagaagtataagtatgtatttttttagattagtagttaagttagaaaaattaaatgtttattaatttttggggtgaagtataaaaaatgtagaataaggttaagttttatagatagtagtagaggatcggcggagaagaagtaagtgataagagggaagagtttaggttatttatttagtttatagatttagattttttgaatggaaaacgtttgattaaagtttttatatagttagttttagagtgggaatttgggtttcgtattgtttaaggtttttcggatgtaatggtcgagagaatgtaagtttttgaaatttttgtttagggtttttttgaagatttaggaatttttaagaatttggtgaaatattttttagaggttagtcggtaagtgcgggttatttcgaatttatttcgggtttattttttgtgttaatatatggtatttcgtgggtagattttgttttttattggggtgttttggtttggggttttagtatgattttttttagtagataattagttttataagaatggttttatatagattttggagtttatgttttagaatattttgaaaataaagtcggttttatatttgtgagtatttttgggtagttgttagtttggaggtaggaggtatgaaaggttcgcgtttgttagttttgttaatttagtaggttcgtggttttaagattttggtttgtgggatatttcgtttatatggtttagggagttttttagaaatttagggttttgttaacgttattttttattttgggagtgaaaggattttttattttataggagttttttagtatattttgtttagtaaagcgcgttagggtgaagttagggggtttttattgttttattaggtgggtttaagtagttttatttgtgagttttattaagtaggtagtttgtttttttttttatttttagtttttagtacgagagatttttttaggtagaaagttaggttgtaattttttttttgaataaatgagtaatgtagtttaatagtatgtttttagtaaaatttatttttaaattattgttaaattttaagagtgtaatgtttggaaaataaattttatatttaaaaggattcgagaaatgttgtggtttagtttagtttggttagttttttttggtttttagaaatcgtgattatattaggatatagtgtttgttagtttttattagttttttcgttttttagaatagaaaagatagaaatgtttatttttttcgttttttttatttggtgaaatttttttattttattcggtattttttttatttttatagtttagttttttagattatatgaggtaatgggttaaaaaaatcgttgtgtgttttagaaatattaagtttttgagtatttgtttttgggagttggtggggttttttttgatttagtttttttattgttaaaggtttttgggaagtttagagataaaattgttgaggatgattacggggtatatttaaattaggggggatttttttttttaggggatatttggtaatgtttagtgatattatttattgttttttaaatgattttattgattttgaattatttaggaagtgttttagattttgaagtttgtcgggagattggataaagttttgtattagtttggggggattgtgggggttgtaggtttcggggtagtttgtatgttggtcgcgttttgtaatattaaggtcgtatgaattaaggattgtagaaggtgttttttgtaggttgatttagttagttgttggcggtttattatttggttagtttgtagggtgggaggagagcggtttttttattttagttttttcgagttgggtttattaagtagtttttattttgtttttgatgttttaattaaaaaattttttaaattttttttgtaggagtttttatttaaaggaaattatgtaaggaagtttaatatataaaaatgttaaaaaataaaaattttaaaatttaaaaagttaaggtgtttcggtttaagttagggaaaggggtttgaattttattttattttaggatttggttttttataatttgtttatttttagtttttacgttattaggttggtttttaaagaatatttgagtttacggaagtaggatggaaaatttaggatttatttagaggtttttatttattaggttttatgtgtttaatatagagtttagaataaaaataatattagttatggtgatgagattggttatgggatttatttggggattatgagtaaatagatttagtttttgtttttacggagtttatagtttcgaggggataggtatttttttgggtttatttattaggttgtatttgggttgtgtttattgtttgtttgtttttttggagggtagagtagatgttgtttggatagtatttaggatagcgtttgtgttttttggatagagatttttagtttagtattgttgatatttgggttttataagtagtttttgttttaggggttgttttgagtacgggaggaggtttagtagtatttttggtttttgtttattatatgtttatagtatatattttacgttgcgattagtaaaagaatttgtaaacgttgttaaatgttttttggtgcgatatttatttttttttggaatagttgattttagtaatttttagtaggtaatagtatttagaaaatgttagttggatgtatttttatttaatttagtgtatgcgtgtatatacgtatatatatatatatatatttttaaatgtatttatatatttttttatattgatatatttgtaaatttttatttttatatttagatatttttatatttatatatttatatttatatatatatatatttttataaatatatttatttttatatatttatatttttttatatattgatatatttttatttttatggatttttatatttatagttatttatatttatacgtatttatacgtatacgtgtattttttattatttttatttacggaggagggggttgggtttaagcggttgttagttgttttgagtttattttgttggttgtagtataggggttggagtggagttagatttaatgtttatattttttttttattttattttttttaaaatattttttttgggatttaaagttattatttgagaattatggaaggatttagttttggtagaagttgttgttttttggtgtttgtgatttttttttgttagtaggaaatggtaggtgatacgtgatttggtttggcggttcgagttggtgtttttatttttgtttttttttttcgggtatttgaggtttttacggtttagtaagtgtggtaggtggagtttgtttttgggtttgaggtttttgttggattttagtttttgttttttttttgttttatgtaaagttttaattatagaatgttgggatttattagaaagtattaaagaggttttttagtaggtggggtggtaaggtagggttatatatagtatggcgggggaattagggttgatttttagtttattagttttatttttggagtggtttgggattgataaatcgtgtttttatttttaaggttatttttgttttttaagaagtatagaagaaatttttttagtaggttttttttagttaaaatttagtttagtattaaaaatagggttttaggttatagtattagttgttagtttgtatttttatttttttttttatttatttgtttgggaggaatttcgagaagattaatgttagagaagcgaaaggtagttaggagttgggggaaggtttgtaggttatggtgttattatttattagttttgtgattttgtataatttatcgaatttttttttaaaaatgtattatttattttgttttttagagagatagggttttgttatgttgtttagattggttttaaatttttgggtttaagtgatttttttatttcggttttttgagtagttgagattataggtatatgttattatgtttggttatttaatttttttgttttagtttgtttgtttgttaatgggtatgttaatttttgtttttaatgattagtagtggggtttaaatttaagaatggtatggagaattaagtaaatagttgtttaatttattaatatattttttttttagggttgttttggagatgttaggatatttgtgaggatgtggtttgggttttagttttagagttttagcgaggagagggatatatggaaaatgtttagtaaatgttattaaggtttttgattattaggtttagtgcgttattattggggtttttttttttattagtattgtttgttaatgagtaatgagggtttaagaggggttatataaatatttttttagtttagtagatttaggagagttagaggagagttggattataggtgttaggtaaagttaaggttaggatttgttcgaggaagaaaagaacgtgattcgtgattttgggatttgggagggtagtgggtagaggtatttttagtaattcgatattatttgagaattgtttaatagtttttgggggattgagggggatatatagagtttgtgatttttaaaaattttagtggggtagtaggaacgttggtttaggaattagggtatggggattttgttatttttttattttatgattttgagtaagttattttttttttgggttttggtttttttatttgtaaagtaggtatagtgtacgtttatggagattacgttgtttataataaatttataggtaaatggaaatttaggtaggaaggtgttttattaagataaaagggttatagggttttattaaggttttgttaggtttagttttggttagattagtttcgtattttggattaaggtttttatttttgttagttttagatttttgtttgttaagattagtgttttgttttagttttgttatttatttgtatatttttttgagtaaatttttttgggtttcgttataatttttatagggtgaggttgaaggggtatttagtagagaaatatttatgatttgttttagaagttttaggtttcgtttattaggaagagtagttataggaaggtaataatgtaattttatatagatatattataaaaatagtattaggaatagtatttgtggtattaattggattttaaattcggtattttttttaagttttatagaaattttaggagggaggtgttagtatgttattatttaatagacggggaaattgaggtattaagaggttaagatgtgtgttttaagttagtaagtattaagttggttgttttaaggttaaagtaattttaaagggaatgttgataatgattttatattgttttaaatatatttatagtttttattattattcgtggtttagatataacgttgtaaggtgggttgtacgtgattatgaggtttttagcgtgtggaggttagttgggatagttatatgttttttttttattttgtagttattattgagttattatgagtaggtttgagtttttggtaaaattagtattttgaatttttttttttttataatatttagaaggttttttgtttttagtttttttatagtatttttttaagacggttaatttaatgttttggaaaagtatttatttagtatattgttttatttgttttttaaggaggttgtttcgggagaggttgggtattatatttagtttataaatgggtaatttgaggtttaaaaataaatataaaggtttatttgatttttaaaggttatatgtttagatttttttttattgagggaaaggtgaaaaatttattggtttgttgtgggtgtaggtgtggtatttattttttcgggggagggcggataatagttttttggaggtttttagtgaagtagataaagggagagtaggcgggaattgttgataagggtagtatcgattgttattaatagtaattggtttagattttattttttgtaatatgtttggttttaaggttatatgaaagttagtgttttttttagtatattgtgttttttatagaatagatttttaaaaggagggaaaaaattaatatgtgttgtggttgtttgttgtagtaatttttttagaaaattgtcgagaatagtattatttttgtttgaattttaaggaaaattattttgagataggttttggatagttttgttttattgtggatataattttttgttatttttttgtttaaagagattttgaagttaagttataaagtagtttatgggtttttttggtgttttttggtttttttgaaatttaaggttttggggagggtgaggaagttggtagtttttacgaattgttttttttaattaattaatttagtaaataatatgggtggatttattggatttttaagaaagttttttagtttagaggttagggaattgtattagagtaattagaattaaggaaatagtataaatgttagagaataaaattatagtaggaatttttcgagggtttttgtattttgtagtggagtttgaaatttaggaggtattagtgatgtttgatatttaaggaatgaaaaagggattattaagaaggtgaattttattgttttttttttaaataagttaaagtcgtatttattttttgggtgtgggtttagaggggttggagttgaaattgaattgttgtgtgtttaatttgagtatagtattagggaggttagtaagagtgttttaaatataatagtaggaagagggaggtgttaggaatttcgttagggtttattttttttttgtaatataatcgagatttttttggagatttttagtggagttttggtagtacgagtaatttgtttggtagatagaagacgatcgtttgaggggacgaggtgaataattggaagtttaaaggaggatattggtttttttagaggattattttgtgaaattgtaagataggtatgagttgcgttggatggtttgagataatttgtggaaattatataaacggagttagtgttagtagaggacgaggaaatggtttttttatatagaattttttgtttcgagatgggatgttagttacgttaataggatttttttttagaatggttttgtagtttttatttttcggaatgggttttcgattttgtttatgtaagatggtttaagttatttttttaattagtggagatgttttttttattattattaatataatatttattaaggataggtttttaggttttatgggagatatggataggttttaggaaggatttaatttagttttttttttagtagaggatagttaaggaggtttttttggagaaaggaggagagttttatgattaaaaaggaggaaggagagatggtaagtatttttagttgagagaggttatagatttattttttaaatggtttttttatatttatatttgaagagggttatttggaatttttttaggtttcgtgggggtggggtagagggtgaaggtaggagaataaggtggagatttgggtttttatttatttttttttaaatagaattttatgtagatttaaaatgtatagttgtagaaagtttttttatagatttaaagaaaggaaagattaaattgttggggagggtatttaaggtttttagattgttaaggagttttattttttattagtttagttgtaagaaaattcgttggatttaaaaggttagagatggagtttaggtaggtagggtataggtaggtttgtaaataatgttaggtgggaaagttaaagatttgggttaaagagatttgtttatggtttcgattgtgtaatttatttttattttgtagtgttggggtttacgttttattcgagggagtttaggtttttttttatatggtttttatttcgagaatacggttttaggttggtatttatttatggttttttatttttgtagtcgtttttttgtggggttttagtgtttttagtttttttgtttatttgtttgggttaagtttttagttaagatcgttatttagtttgtttttatttttaagttgaaagataaaaagtaagtggatacgcggtatttttattatatagttattaagggaggtaggaataatagtttggggtggatttaggaaataagtttttttttaaaaggtgggtttagagggtgtgggtggtttttaagcgtaatgttggagggtggaaagggtttaggaggtttattttgggtagaattttatttattggattttggatagaagagttattagtttgagttttaattttttgatttgagaggtggaaagaatgttttttattttagttagttgatgtgatgtattgaatttttaaggtattatagtaaataagagttatttattgagtatttattaattttttggtattgtggatatagggtggtttgaaggtatagcggtatgtatgattatattttttttttttttttttttgttattttagagtagaggtttttaattttgtttgtttgtaggatattttatttttaatttagttaaaggagttttgaaataatagtatattttttgatggagagagaatcgtaggagatcgggtttggaaatgtgtattttagataagatttttatgatattattatgtaatttatataagtttagtaaaaagtaatatttaggttaagtatttgtaggtatttttatagttttgggtaggtttaggataaagggttttagattttgtttgttaagaagatgttttgagaatgttttttgcgggtgttattgacggtaaatatttatacgttgttttttatatgtttagtgttgtttttaggttatatagattaatatttatatattttgatggtattatgtttgttatttttattttatagaaaagtaaattgaggtatggagtttttgattgtttttttatttgagtttgatttttttaggcgttttaatatgttgttatggaaaaaaaataaaggttttgaagtttaattgttcgggtttaaagtttggtttttttatttgagttatatggtaataggtaaattttgaaatttttttggttttagttgttttatttatttaatggagtaatacgatttaggtaacgtttttgcgaggatgaaggtagatggagggagatagtggttgttttggagggagagagatgtcgtgtttttttttggttttttttttaggttgagttaaatttgaattttgtttgagttttagatgttgagttattacgtttttttttttaggataaggtttttgagttatatttggaatgggattttttggggttgggttttaaggaagaattgtagttttgggttattcgaaaaatataatgttattttttttttaggtttatgaggaggtaagtttaggttagcggattttaacgtaatttaggggggtttttagtttagttgagatttgttttttgttatggggggggggtagttttatttagttaaaggttaatttagggggttgtagtttttaagtttttgttttttaggttggttttgttaattttttaagaatatttgatttatatttaaaaaaaattatttcgttttgtttttttggttttaaaagtttttttattagaaatttaatgaagatgtaattttttttcgtttttttatagtaggtaggtaaaattttgttaggaattttttttattgtttttagttttatttaggagttttttataaagttgagttttagtttagttcggtttgggtatatttttttttatttttgtgttttattttttatttgtaaaatggaaagaagttggattaggtaggttttgtgtgagttttttattttattttaaatgattaaattttgttgttttaaaagaatttttttataagagatttaaatagatattttaggattttttaaaagtaaaagttaatatttttatttatgtatagtttattatttcgttcgaaatttaatttgttggtttataggagaatggggtagaagatttagagttatttattttattttatgtgtatattttaattttttttatttgttaggcgttgggttaggggttaggttatagggtagggtaggtaaatttttttttttgtttagatgtagtgggagatacggttttataaagttaagaagttataggttaggggaatatttagttttttatttatattaaaatttttttttttttttatatttttttttattttcgatattgtgttattttagtttggggttggttttgtcgttatatatattatatagaatcggtttgcgtttttagtcgtgtgttttttttattagaaggtagtttttttaagaaaggcgttggggtttgttttttttgtattttgtttattttaattatatttgtgaaatttaataagaacgttagaattttttaataggaagagtttagattgaaaaattcgttttgaaattatatttttgtagtaagaatagggggtttgtatttagatatgtttttttgaggtagtttaggagaaggtttcgtgtagttgatgggtattataaggatgtttatcgtttttttgtttggttattggttgatttttgaatattagatattttttagtagtttaaagaaattaaataaattgaagtgtttttagcgttcgtgaggaaggggtgtttttggatgggtataagataattaagggttttgttttttttatttattgttaggtattttttatttttaagttatagaggcgtgttgtttaggatttttagggatagtagggataataggcgggggatatgggggaggggtgggtaaggaatcgatttattaaattttagttttagttattaatttgatagaggcgtgatagcgtgttttttttagaattagtcgtattttttaagtttagttcgaaattttttttcgaggttgaattagagatcgcggcggattttttaggaacgtcgaagtaattttagttgttttttttcgtggagggtaggagcggttagtattagaggtaggggaggggaggaaagcgggggagggtgggcggaggcgaaaatgacgttatttttagttttagttagtttaaggggtcgttaaatgttcgcgagatttttttcgtttaggttattttttttacgtcgtcgatgcgttaatttcgggttttttcgggggcgtattttgtttagtggcgttcgtagatatttgtttcggttcgcgtgttgtattgtgatatattttggattttttttttatatatacgtttatatttatatatgtatatcgttttgtgtgtgttacgggattgaagcgttattagtttttcggatttatattcgttttcgatttagtttgtaagttagatatatttacgtttttttttttagtttttttgttagcgttatttatttttattaattttttatttatatattcgcgcgtaattttttcgtttttagatatagatatatatatatatatatatatatatatatatatatatttatttagttttttttgtatttacgtttagcgcgtatttttgttagcggcgttagttgggattcggagacgacgttaggaaacgttattttggtattttttcggatcgttttatcgtttttttttcgatttttagaattttaatttttagttaggggggagatgaatgggattttgtttttttttttttttttttcgtaattgaattttttattttagcggtgtttgtatttaaagttttttcgcgttcgcgtttcggggtgatcgcgtatttgtagtttcggggcgtttatttttggagtacgcggggttataaagggcggttttggcgttttagcggtatcgtacgggcggtttttttttgtttcgcgtcgcgtttgggagaagagggcgcgggtttatttaacgcgagggagaaaggaaaggacggtgtcgaggttggcggtttagcgtttcgcggaagtcgagggcggatggtgaattgacgagttttagtattagttgggagttaggcgaggtttgtttacgttcgggcggagggcgattttataggcgtcgcggtttcgttttcgcgtttcgttttttttagattttcgtagttttagtacgtagtcgggatatatttttttttcgttttttgtttttttttttcgggcgcgtcgggttgggttgggtttcggtagcgcgcggcgggcgtttattggagtcgtcgtttgttgcgtaagtagtcgtaggggcgcggtcgggaggggtatcggggttcgggttgtgggtcggttttgtagtttttttcgagtttagggtttcggtttgtgtagcgggcgcgtgtgttttgttcggaggaggcgtttgtgtgtttgtgcgtgtttatgtgcgcgttcgtgcgtgtgtatgtggatttttttgtgttttcgtatgggcggaggttttttatttttgttttagagttttttttaagagtttcgttgcgttacgttttgagcgattttttttattttttgtaggttttattagttcggttttttagtcggattcggttgtttgtttagtagtcgttttcgttttcgttcgataggtttttttcgatttttagtttttcgtgtcgttaaagttttcgttgaaattttcgttttcgtttaatttcgtttattttgtttatcgtcgtttagcgtttatttttttttttatttttttagttttaagtatatttattggattttgtttattgggttttttttttttgttttataagtttagatgagaggatttttatttttttttattttgattttttgaatttttatgatttattttttttaattttagtatcgttttgttttgttgttttgtttgtgcgtaattattggtttgtatgtttttatttggttaaagaaattagtaatttttaatttttattgtatatgagaagttttagaggagtcgttaaattaaaaaataaataaatagatagataataaaaagagagagatggattttagaatagtttaattagaattttagggggtgtaaattaattgggtattggggtttttataaagttatttaggtggtttttgacgtgtagttaggttgagaagtattgtatggaggaatatgattttatgaataaaggaagtttgatttatagttggtatcgttattgtttttaggttatttgtttagcgttgaatttgttattgagtttaggattagatttagggtaagtttaggtgattttttttgcgtttttatagatatatacgcgcgtacgtataatattttttgttgaattgtaaattttttttttgtgttaatttatgttgtttttaaggtaggggttatggtttttttttttgattattagggttagttttggagaagggttttttggaataaaagaaatatggagaggggtaaatagtatttttaggatttaggatatttgtgttttaggtttgtttttgatattatcgattataaattaataaatttgggttttagaatttttattggtaaagggagaggattagatttaatgattttttagaatttatttagtgttaaagttttgttattttattataaatgattagtgtgaagaatagagttttagtgttatgggttttgttgttagaagagtttggttaaattataaagtttggttattagttatgaagtttggttaaattataaagtttggttatatttaagaatgttttgaatgtaggagtatatttttttattttagaaaatttaatatttagaattaataagtgaatgaatgattattgggtagttttttattttttatggatttgaattagtttaattgtagtatttttagtgagggaaaattttttttattttaaataaaatgttgtgtttaggtagagtggtttatatttgtaattttagtattttgggaggttaatgtagaagttttttttgagtttaggagtttgagattagtttttataatatagtgatgttttatttttataaaaaagatgaaagttagttaggtttggtggtaagtatttgtagttttagttattttagaggtagaggtgggaggattgtttgagtttaggagttttagaaaagtttgagtaatataatgagatattatttttataagaaaataaaaaattaggtgggtttagtggtatgtagttgtagttttagttatttgggaggttaaggtaggagttttgtttttttaggttttgaaatttatttattttgttattttataaatgatagaattgagttgtttttatgagttgggttttgtatttcgttattgggaaaggattgaaaaggtaaaaatattttttataggtgtatagtatggtatagttttaagacgtagtttttttatttatatagcgtggttgagatgaatttatttattttttaattatattaaggatttattatgtttaggtattattttagattttggggatatgattatgaataatagtaataataaaagtgtatttttgggagttattttgttgtttaaagatttttttagattaagtagtttgtgtgtttgttattttttagttagtttatatatatttatttttttataggttttttattgcggcgatttattgagtgagtatttttggttttttatttgttaaagatataagagtgttaagtttaaaagtgcggagtgttaagataaggaatgttaagtttaaaggcgtagggaaggcggtttatttttttagtaataaatggaattagtgtatggaattagaagggtattttgttaggggaggtttttgtttgtttttttgaggaggtttttaggatagaatgcgaagagtagtttagatttgtagtttgaaatttcgaggaggttgtttggtaggaggttgggtttgtgtgggaagtttaattttttggaagattattagtattgaataggttagaagatagaggaaggagagtggagtgaagagaaaagagtagagaagggaggtaagaatttgagtaatggaatataattttttaagtgatggtattttaaaattagagtttatattattttggagaaggtttgaggaagatattatttggattttatattttttttttttagtttaatatagttaattttttttttttgttgaaaaggatgttttttttcgttgagtattagatgaagtagtttttttagttaagtgttacgttgtaggagaaagattgtttttagtataggtttggatgtatataaagtatagaggacgtttattttatatagaggttttttattgggatttgggagttgtatgtatttttatattttttatcgtagttagttgaggtggtagaagtttacggagttgaatgtgggtgtaattgtattgattgtttatattatttttttttttcgttggttagtagtagaattagatttgtttagtaaatgtatacgcgttgtaaattcgttataggatgagattggattttttggattaatgtttattggaaatttttatttaataataatttagattttatattagaatattttaattaaatgttttaaaaatgattataggaattatttgtttttaattgttttttttaaaatttatgggtattcggggttgggagagattaagatgtagtagggatttatggagaagaattcggtggtttgtggtttttagttttaattttattatttatgagttgtagtatttggggtaaattattttatttttttgtgtatggaggaaacgagtgagagaaattattagattttttaattataatttatgggtttattgttgtagattattattttttttgtttgttaaaatgaaaaagtgttcgtaaaagtgtttttttatttttagttttgggttttttcgggatttttttttttttttagtatttattttttttttttttttggattaaattaattaataagtaaatatttattgtaattaatgatttattttaaattaatttttttttaattttaagttttttatttttgtattgtagtttaattaataagtaaatatttattgtaattaatgatttattttaattaattttttttgatttttaagttttttatttttgtattgtagtttagttttttttatttttttttttttaaattttttaaaataagtatttgtatttaaaggtttattttatttttttttttttttattttgtagtgattattaagttttttttgaatttggttaaataagtttttaaaatttgttaggaaaaataatagtttttgtttttttatttttttatttttttatttttagaagttattattttttgtttttggagaattatttttattttatttttgttatttgtagattttatgtttttgggtaagttattttattttttttttttgtttttttatgtataagatatatataataatatagggttattgtgataaatatatgtgttaatatatgtaaagtgtttagaatagtttttggtatatagaaggtttttattaaagtgtttatttttatttttattgttattattattattattattattattattattattattattattttgttttattttttttggtattttgtatatttgatcgtagagaagtttagtaaatattggttgaagaattgagtaaatgtagatgtttttttttgaatttattttattttattcggttttattgtttggattttgttaggagggaaaaggggattttatttgttttatgattttaggtggagggattgttatttgggatttttatttaagtaaaagtaaattattttagttatttgtaagtatgtttggtttgtaatattatgttgtgagtaatgaaaattaaaaaaaaaaaaaattatgaaaggaaaataattttaaatgagggtgaagggtaggttatgtttaggatgtgtaataaattttttattttgaatataaatgaagagttgtgtaatgt

SEQ ID NO: 235 - DNA, 5987 bp, Artificial Sequence
  chemically treated genomic DNA (Homo sapiens)
tttttaatttgtattattttttttattttaataattttttttaatattttttataaagtagatttattggttatagaatgttttaatttttatttgtttgagaaaattttattttttttttatttttgaaagataattttgtagggtatagaattttaggttgtaggttttttttttttaaagtgaaatattttattttattttttttttttttgtatggtatttgagaagaagttagatgtaatttttattattattatttaaaagattgtttttgtttttttttttttttttttttttttttttttttttttgtatattatattttttatagttgttttatattttttagatattatgttttggtttttttttgtgtttttttttttgatttttagttttagaagtttttatttatatatttgtaatcgtagggatttttttttttgttatgtttagtttattaataagtttttatagatattgttgatttttgttttagtgtttttgatttttagtatttttttgattattttttggaattgttatttgtttatttatattattaatttatttttgtgtgttgttttattatagtaattgtagttgttttaattttataggtattgtaattttaatatttttattatatttgatattgattttgatgtttgttttgttttattaagttatgtttttgttttttagtgtgatttttaattttttgttgaaagttaggtatgatgtattgagtgaaagaaatttaatatattgtaatgtgacgataagagtttaggggaagtgaagtattttatagttttatagtaggtttcggttttttagtgagtttgtgtttatgaacggtgatttttaataagtgttttttattttattttttttttgtttttaagtgggataagattattgggggggggttagaattgggtattttttttttttaatgtagaagttaaagagagggttggagttgggtatttttttttttttgtatggaaagttagaggtagttaaatttggatatttttttttttttaatttagttaggttgcgataaaaatttcgatagtttaggttttaatattataaaataattttttttgagtataggttttattaagaatattatattttgatggagttgagggggagttttttttgatatttattgcgagaatttcgtagagttttaggaagtaaaatttataaaagtgtgggagttttttagaattttttttttgtagatttatttgtattgaatttttagaaatttattaattatagtttaggtttttttatttaggtattggtttttatggaggtttttgtttgtgtatttttgttttagtaagttgttttttttgtatggtttgttttttaaattttttaagtagggttatgatttgtcgttttatttttttgatagttttgagagtgttgattttttagtttgtttagatttttatttgtttttaggatgaagtgataatttttaagtttttttttgatatgttagattagaaattgaaagttttaagttttatattttgtgcgtgggtatgtttatattttgtttgttttagtgtttttattttatatttttttttttttttttgtttttttgtgagatttttaggtttaatataaagattgtgtttaatttatttaattattttggtttatttgagtattataatgaataattataaaaaaaaatgaagtaaaagaaaaatttattaaagaattgagatatttgagaaaaagaaaggagattagtgttttataaaatttagaaatagattttttaagtgtttttttattgatttatgtgaaaggattttttttaatttaataaattatgtgttttcgtttatagttttaaaattttttgtgtagttaagaatgggtaaataattaggttttattaaaggattaacgtaaagattttttgtaagtaatatttttgttatttaaggaagagataaattttatggtataattttgttaaagtatattaagaataattttgatataaagttttttttttagttaatatgttatgaaagaaagaagataaggggtgatttttattttttaagtgaattattaaatttattaaagaagaaacgagggaaatagaaagaggatttttgtttgagataatggatttgtatgtatgagtagtagaattttgtttaaagtataaggaagggaaaaaaaagttagtttatttggaattttggatattaagagtttttattgtttatttttttttaatttatatgaatggtttattattttaattaataaatattttatttttttttaatatatttatgaaataaatttgaaatgaatagtgtaatatgtgaatgtttagaatattataaaattaaatataaaatttgtttggtaatttttttagtattttaggaaaaaagttgataaaattttaagtagtagaagggggtagtaaaatttaatagaaagttttggaagatttttaagatttttttttattttttttttatgtagattattttttaataaattttagacgttaatagaaattttgtataatagatttatatatttgtttaaaatagatatagaaatattgaatatatgtaaatatgagagttataagttttatatgattaaattttttttttatggtatataatagttatagtatttttttatataaaataggtttagtggttttaatttagtttggtatatttaatatatttttatgattagtattttaaatgtatttattcgttttattttattgttttagaattgttagttatttaataaattatgtaatttttttttttatgtttagatttgtatttttttttaaaattttgtttatttttaaagttttagattttttttgaatttttttttttgattttttaagtatatggaattttttattttattttgttatataagtgatagaatttttattatgggatagatggagtttaatttttttgagtttaaaataatttaaatataattattttttatgttttgttttttttttatttttgtatttaaatttttttttagataatagaataattaatgtttgataaggaagataatgatgatgattattttaaaatgaatttaggattgtaatgtaaaattttagtatttttttatagtatggattttaatatggtttttaatttaaattaatattagtagttttaattataaattttaaattttagtagatgtaatttatttttttaaaatgaaatagaagattgaaattattaaattattaaaaagaaaatgatttacgtttttagttgaaattttatgtaagattttatgtaataaataggagtgttataaatggaatgatgaaatatgattagaggaggagaaaggttttttagatgagatggaattttagttattcgtgttttatgaagaattagatgtgtatattaagtaaaatagttaaaaaaaaaatttttaagtgagttttttatttattttttttttataagatttttataaattgaggtatttggtgtagttttattttaggttttatgttgttatttttttgtaatgttaaggatttaggatataattgaattttttattttttattttttttttggtgtgtgtgtatatatatatgtatatatatatatatatatatatatatatatattttttagtattttatttttatatgtttttttttgagtattatttatgatagatgttaaataaaagtaaagatgaaattttaattgttaaaattttttttttatttaattaattttttatttaattatgttttaaaacgagaatagaaaattagttttaataagtttaggtaattgaaaagtaaatgttatgttgtattttgatttatggttataatttataattttggaaaagtggatagaaaagataaaagagtgaattttaaaattcgaatttattttattagtattttttatgaagggttagtaattaaaataatttacgtattagggagagaaatgttttaaggtatacgttttggatatttagcgtttttgtaaattttggttatcgtcgttttttttgtttattagaaggtaggaaattttatattggtgattcgtggagtttatattaattatttatagggtaattgtttaggattagtattatgaggagaatttatttttttcgtttttttttttaagaaataaggagggggtgaaggtacggagaatagtattttttttgttgaaagtaatttagttataaagataaattatagttatgtatattgaaggtagttattttattttataaaataagagttttttaaaaagttatgtatgtatgtgttgtatatagagtagatatatagtttattaagcgtcgttattaaaatataaaatatgttagttttttttaattttattcgttttagtttgtttcgacgtgattttttcgattttttaaagacgtatagattagatacggcggcggcggcgggagaggggattttttgcgttttcggattttagggtcgtttagatttttggagaggaagttaagtgtttttttgttttttttcggtattttatttaaggcgattagtttagaattggttttcggaagcgttcgggtaaagattgcgaagaagaaaagatatttggcggaaatttgtgcgtttggggcggtggaattcggggaggagagggagggattagataggagagtggggattattttttttgtttttaaattggggtagttttttgggttttcgatttttttattttcgtgggtaaaaaattttgtttttatcgggtttacgtaatttttttaaggggagaggagggaaaaatttgtggggggtacgaaaaggcggaaagaaatagttatttcgttatatgggtttggtttttagttttataaaaaggaaggttttttcggttagcgattaattgttatacgatttgtagtgagcgttaggagtacgtttaggaattttttagtagcgttttttttagttttatagttagacgtttttagatagtaaagtttattttcgcgtcgcgttttgttcgtcgttgcgatgttcgttcgcgttttgttgttgtgcgcggttttggcgtttagttatataggtgagtatttggcgtcgcgtatcggggatttcggttttacgtattcgggtagagttttcgttttgattttttgggtttattttagtatttcgattttttttcgaatagagaagttacgtgatttgggaaagagtttggatcgttagagttcgaaagaatttcgtggatattttagtttttttataagtattgattattatgagttagttatttaatcgatttgagatatttttattttttaaatagggatagatgatattaatttgtaggttgttattatgataagataggatttgattaatatatgtgaattgtttatatttggaatttttttattgagtggaagaagttgttttaaatattttagttagtttttttttgtttttaggaaagttcggattatgttttaagataagtaaaatgttttaaaagtaagttgttttattttgaatttttttttaaatgttgattagtgtattagatttattttaatttggaaagtgaagtgttatttatttgaattttttaaaaatgttaattttaatatttaaagagttaattaagaaaagtttagtaatatgatgtattaagttgaatatgttgttatttttatttagaatagaaaattggtatttttacgttttatttattttaaggtaggttaaaaaattgtatttttatgattatttatatattttttgaatttattattgtaaagttgatttatagttaaataattaaatgtttaaattaagattaagatattagagaatgatttatttgttgttttttaattgtagt

SEQ ID NO: 236 - DNA, 5987 bp, Artificial Sequence
  chemically treated genomic DNA (Homo sapiens)
gttgtaattaaaggatagtaaataaattattttttagtgttttaattttaatttaaatatttaattgtttgattatgaattaattttataataataaatttaagaaatatataggtagttatggaaatataattttttaatttgttttagaatggataaaacgtagaaatattaattttttattttaaataaggataatagtatatttaatttggtatattatgttattaagttttttttagttaattttttagatgttaaaattagtatttttaagaagtttaaataagtagtattttattttttaaattaaaatggatttagtatattaattaatatttagggaaaaatttaaagtaaaatagtttatttttaagatattttgtttattttaaaatataattcgggtttttttgggagtaggaaagaattgattagaatatttaaaataattttttttatttaataaaaaggttttaaatataaataatttatatatattgattagattttgttttattataatgataatttgtaaattagtattatttatttttatttaggaggtgagagtgttttagatcggttaagtaattggtttataatgattagtgtttgtgggaaagttggaatatttacggagttttttcgaattttagcggtttaagtttttttttaagttacgtagtttttttattcggagagaagtcggagtattgggatagatttaggaggttagagcggaaattttgttcgggtgcgtggaatcggagttttcggtgcgcggcgttaggtatttatttgtatggttgagcgttaggatcgcgtatagtagtagggcgcgggcgagtatcgtagcggcgggtagggcgcggcgcgggggtaggttttgttgtttgagggcgtttggttgtggagttgaaggaggcgttgttgaggagtttttggacgtgtttttgacgtttattgtaagtcgtatgataattggtcgttaatcgagagaatttttttttttataagattgaaaattaagtttatgtgacgaaatgattgttttttttcgttttttcgtattttttataaattttttttttttttttttttaaaaaaattgcgtaagttcggtgggggtagggttttttatttacggaaatgagaaaatcggaaatttaggaagttgttttaatttgggagtagagggggtagtttttatttttttgtttgatttttttttttttttttcgagttttatcgttttaggcgtataggttttcgttagatgttttttttttttcgtagtttttgttcgagcgttttcgagagttagttttggattgatcgttttggatgggatatcgggggagggtagaaggatatttggttttttttttaggaatttgagcggttttgaggttcgggggcgtagggaattttttttttcgtcgtcgtcgtcgtgtttggtttgtacgtttttagagggtcgaggaagttacgtcgggatagattggggcgagtaaggttaagaaaggttgatatgttttatgttttagtgacgacgtttaataggttgtatatttgttttatatgtagtatatatatatatagttttttaaaaaatttttattttgtggaatgaaatagttatttttagtgtatatagttgtaatttatttttgtagttaagttgtttttaatagaagaaatattgtttttcgtatttttattttttttttgttttttggaaagagaggcgggaaaggtaaattttttttataatattggttttaagtagttattttgtaaatagttaatgtgagttttacgggttattaatataaagttttttgttttttgatggataaaggaagcggcgatggttagaatttgtagggacgttaaatgtttaaaacgtatgttttaaggtatttttttttttgatgcgtggattattttggttattagttttttataggagatattggtaaaataaattcgagttttaaagtttatttttttgttttttttgtttatttttttaagattatgagttgtgattatggattaaagtataatatagtatttattttttagttgtttgggtttattggggttaattttttattttcgttttggaatatagttggatgaggaattaattagatggaagggagattttgatagttggaattttatttttgtttttgtttaatatttattatgggtagtgtttagggaggagtatgtgagggtgagatattaaaaaatatatatatgtatatgtgtgtgtgtatatatatatatatatatatatatatattagaaaagaagtggaaaatagaaaatttagttatgttttaagtttttagtattataggaaaatgatagtataaaatttgaaataaaattatattaggtattttaatttgtagaagttttataagaaaaaaataaataagagatttatttggaggttttttttttaattgttttgtttagtgtatatatttgattttttatgagatacggatgattaaaattttattttatttaggaagtttttttttttttttagttatattttattattttatttatggtatttttatttattgtatggaattttatatgaaattttaattaagagcgtggattattttttttttgataatttaataattttaattttttgttttattttaaaggagtaggttgtatttattgaaatttgaagtttatagttagagttattaatgttagtttgggttagaagttatgttagaatttatattgtgagagagtattaaaattttatattataattttgaatttattttgaagtgattattattattgttttttttattagatattaattgttttgttgtttgaaaagagatttggatataaaagtgagggaaaaatagggtataaggaataattatatttagattattttaaatttaaaggaattgaattttatttattttatagtggaaattttgttatttatatagtaggatagagtgaagagttttatgtatttggaaagttaaaaaaaaaagtttaaggagaatttgggattttaaggatgggtagagttttagaaagaagtgtaaatttgagtataaggaaaaaagttatataatttattaaataattgataattttgagataataaaataaaacggataggtatatttgggatgttggttatgggagtgtattaaatgtgttaaattaaattaagattattaaatttgttttatatggaaaagtattgtgattattgtgtattataaaaaaaaggtttgattatgtaaaatttatagtttttatgtttgtatatatttaatgtttttgtgtttattttaggtaaatatatggatttgttgtataaaatttttattagcgtttgaaatttgttgggaaataatttatatgaaaagaaaataaggaagaattttaaaaattttttagagttttttgttgagttttattgtttttttttgttgtttgaaattttgttaattttttttttaagatgttaggaagattgttagatagattttgtgtttaattttataatgttttaaatatttatatgttgtattgtttattttagatttgttttatgaatatgttgaaaagaaatgaaatatttattaattgaagtgataagttatttatgtgagttaaaagaaaatgaataataaagatttttaatgtttaaaattttaaataaattaattttttttttttttttttgtattttgagtagggttttattatttatatatatagatttattattttaggtaagggttttttttttatttttttcgttttttttttggtgggtttagtggtttatttagagagtggagattattttttgtttttttttttttatggtatgttggttgaaaaaagagttttgtgttagggttatttttagtatattttggtaaggttatgttatgaagtttattttttttttgagtagtagaaatgttatttatagaagatttttacgttagttttttagtaaagtttgattatttatttatttttagttatataagaagttttgaggttataaacgaaagtatataatttgttaaattaagaaaagtttttttatataagttaatgaagaaatatttaaaaaatttatttttaagttttataaaatattgatttttttttttttttttaaatattttaattttttgatggattttttttttattttatttttttttgtgattgtttattataatatttagatgagttaaagtagttgaatgagttgaatatagtttttgtattggatttagaaattttataaggggataaggaagggaaagagagtgtgaggtgggggtattggagtaggtaggatgtgaatatatttacgtatagaatatgaggtttaggatttttagtttttgatttggtatgttagggaggagtttggaaattgttattttattttaaaaataagtaaaaatttaagtaaattgaaaaattaatatttttagaattgttagagaagtgaggcgataggttataattttatttaaaaaatttgaaagatagattatataagaagaataatttattggagtagaaatgtataggtagaaatttttatgaaaattagtatttgggtaggaaaatttgaattgtaattgatgaatttttggaggtttagtgtagataagtttgtaaaggaaaaattttggaagatttttatatttttgtgagttttgttttttggagttttacgaggttttcgtagtgaatattagagaaaatttttttttagttttattagagtatagtgtttttaataaggtttatatttaagagaaattattttataatattagagtttaaattgtcgggatttttgtcgtagtttaattgaattagaagaaggaaaatatttaaatttaattgtttttagttttttatataggggaagaaaaatatttaattttagttttttttttagtttttatattggagaagggaaatatttaattttagtttttttttagtgattttgttttatttaaggataggaaaagagtggaatgaaaagtatttgttgaaagttatcgtttataggtataggtttattaaaaggtcgagatttgttataggattatagaatgttttattttttttgaatttttatcgttatattataatgtattgagttttttttatttagtatattatgtttggtttttaataaaaaattagaagttatattaaaagataaaaatatagtttgataagatagagtaagtattagaattaatgttaaatatggtagagatgttgaaattataatatttatgaaattaaaataattgtaattattatgataagataatatataagaataggttggtaatgtaagtagatagatggtaattttaagaaataattagagaaatgttagagattaaaaatattggaatagaagttaataatgtttgtaagggtttattagtagattggatatggtagaggaaagaatttttgcgattgtagatatataaatagagatttttaaaattgagaattaaagaaaaaaatatagaagaaaattaaaatataatatttaagaaatatggggtaattataaaaggtgtaatatatagagaaggaaagaagggaaggagaagagagaaaggaatagaagtaattttttaagtaataatgataagaattatatttgatttttttttagatattatataaagaagaaaagagtggaatgaaatattttattttgaggggaaaaaatttataatttagaattttgtattttataaaattattttttaaaagtgaaggagaaataaggtttttttagataaatgaaaattgaggtattttgtggttagtagatttgttttgtgagaaatgttaaaagaagttattgagataagaaaaatgatataggttagaaa

SEQ ID NO: 237 - DNA, 5683 bp, Artificial Sequence
  chemically treated genomic DNA (Homo sapiens)
atggtaaatatttgaaaaagtttttacgttgaaatttaaattagattatatttaggatgttttataaggtggtattttttattaagatgataaaggataaatattggtggagttagagaggttgtttttaaatatagttttttttattagtaatattgtagtagtttgtatttatcgtttagagtatgaaaaagatttttgttaaagacggtttttggggatttattattattatatgttaagagtttgttttttatgtttttatttttttattttgttaattttttttatttttatttttcggtttagtgtgagattttattattttttttttttatttttttttttttatatttttggttttttagtaggttaatgtttttgtttttttattggaatttatttattttggttatttttttttttatgaatttgttggattatattttaaagttatttaaaagagggatataaagatataataaaatcggaaataacgtttatttttattagtttgtagttaagagtgtgtggaattagggtggttgtaggtaaagagatagggggaagggttgttttatgttatgggtaggatagtaaatggtgtaaattttttggaaagtattttagtaatataggtgaagagtttttataatgtgtttattttatgatttatttttattttttttattttaaaggaataagaagaggtttaattaaagtatgagtgaaaaggttatttaaatatagggaaaggggtcgttatgatgtttacggttttaagaaatagaaaataataatttggtttaaataataagtatataattaaagaaatttagaagtaggatttttttaagagttgagagatttagtagtttaaaaatgtgatttgatatacgagttttttttatgtttttgtttttttttttttaatattggttttatattaaatttggttttttagtggttaatagtattaaatagtatttatcggtatttttgttggtatttaaaagagatggagaaagtttgattttatatggtttttttttaaaagtaataaaggatttttttcggaagtttttagtaaatttcgttagatttgaattatatgttaatttttaaattagttattggtagggaagtgggaaaaaggggaggaggtgtttatttttaattaatatgtttatttttgtttattgagattaattttataaaagtattgttttagttttttgaagaggagtataatgtttgtgagttatttattatatttatttattaagagttaagggataattgagtaaaatggtagagttggtaggaaaatggtgagtagtttcgtttttttgtgttataattgatttgtatataaagagatttggaaatttaaatataagaattttttttttttaagtttagggttttgggtattttaagtttggtttttgtttgggtatagtggtttacgtttgtaattttagtaatttgggaagttaaggagggtggattatttgaggtgatgagtttgagattagtttggttaatatggcgaaattttaattttattaaaaaatataaaaattagttggatgtagtggtatacgtttggaattttagttatttaggaggttgaggtaggaaaatcgtttgaatttgggaggtaaaagttgtagtgagttgagattgtattattgtattttagtttgggagatagagtaagattttattttattttttattaaaaaaaaattttggtttttatatgtgaaaaaataaaagttaatttttaaaaattaaataataaagagtgttaggtgataagttttatgatagagataatgtgtgttttaaaatatatagtataaaatagatggaaaatattttatggagaagggagagtttgaattggtgtttgattgaaggataagaaaaatttgttggtaatttttttttggttttgatttttgatgtagttaaagtaaagtaatttagaattatgatttagggaatatatttagagagaaatgaatttatgatgtttttaatttgaagatgttatgattttagattattttagaatataatgattttttattgttttatatttgtaagaaatgttttattattgaaaatttgtaatatttaaaaaatttttatataaaattatagtttattttgttgttttatgttaaataaataaaatatttttttttaattatgttgttttttttaattatacgtaattttaaaattagttgtaattgatagttttttttttatatttattgttaatgtatttaggttaattttatttttaattagagaaatttagaaaaaggaaattttacggtgaaatgttatatgttttataatttttagtaattaatttttaaggatgataatttggtaaaaaagagaattggattagttttttgaaaggtttattatttcggtttatgttaattgattgttttaaaattatagtgtttttaggttgtagagatatatttaaaatggattattgtttttatattaaaggggataggtttttttttttttttttttatttttgttttttttaaagttgtatagaggtatatgaggtttggggaatatttgtagtatatgttggttggtaagaatgtgggtgaatttttgttaaggggcgtagatatttttttttttatgattttttttttttatttagaataattgaagtattatgataagaggaagggttttgtgtttgagataagtagtttttatatttgttagttttttttaataagaaagtttttttttgttatcgtataggttatttttttattggtaaagtatgatgaagtttggaaattgttgtttttgttttgttgaaagaagttaagttttaagaaatttgtagaggtatttttataattttttagttatggtagtatgaattttgaaggggtagtgagtgttggtttttattttgtttgtatagttaagtttaggggagataatttttttatataagatgtattttgtttttgtgggttttttgtagtttttaagtttttatttgatttgtatataatgatttagtgggttagaggagtttagagttatgagcggtttatttttttaagaattatttttgattgtttagtattatggagtaagtggaaagaagaaaaaaaaaatttaattatttttcgaagagtaagatgaatgttgtagaaggagaaggaaggggagggagatggatgggtgtcgattttagaatttttagatttgtttggatgaattattatttatgatttgcgggataagaatttgattttatttattaattagtagaaatttttttttttgttttttaatatttgaaatttaataaatatgtgttttaggaatatatcggttattttttagaggtattttatatatatattgagtaattagaaaatatttttttcgtaatatatatatatatatatatatatatatattattttgttatataatatttttacgtaagaaaagcgaaattgttgtttgatgaatgtaaatatttggttgtttgtagtagtcgggagttttgttaggtttaagtgttaagatgggaggtgaattttaggggtttttttttgttcgtgttgagatttttatttggttaagtttttatttatgttttggtttcggagcgagttcgatagcgttggattatagtagagggagcgaggcggttgacgttttatttcgaagagatgaatggaattttaggaagttagagttatgttggtttgggatagtggtttggagattagattttaatgatagaagtattaggtagcggtatttatggtaatgtgtgtatttatagaaatgtaatttatatttcgggtttaggagtcgaaaaatgaaaagaacgtttagggaggaaaaagggaaatataataataggtagagagtaatttattattttatgggtttgttttgtaaatagttgaagattttggagttagatggttttgtaaattttttaaataggagttacgttaagaagtacgagtgggtataaaaattgttttttaagatataattttaatttggtttgtggaaattggatacgagtaagtttttttaaaattcgagtagaaagtagttgtttttttcgggttttttgatgagaatacgtatatcgtttttaagcggtcggtcgagggagcgtcgcggtagcgggagaggcgtttttgtgggttttttggtagtcgcggtaggaaagggttcgaaggtagcgaaggcgaacgcggcgtattaatttgtcggtttcgtcgacgtcgcgtttattttttttcggggcgggcgtggggttagtttaggataggcgttcgggggacgcgtgtttttattttacggggacggtggaggagagttagcgagggttcgaggggtaggtattttaacgaatggtttttttggtgttttttgcgtttcgtcggtttatttttttttttataaaacgggtttagtttttagtatttatttttcgttattaattaggtatttcgggagattagttcgttcgaaagtttttgcgttatttcgcgggtttttttaggtggtttttttagtttcgttttttttcgggatgtttgttgattatttcgagttcgcgtggcgtaagagtacgagcgtcgagttcgtgcgcgttaaggttgcgtgggcgggtatcgatttttttgagaagttttagtgtttttaagtttcgattttcgttttttttattttttagttggaaagttgcgcgttaggtagcggggggcggagagaggagtttagattggtttttatttttcgttttttgttcggtcgtcgtttattggtcggaggaatttttaggaatgcgagcgtttttttaaaagcgcgcggttttttcgttttgttagtcgttgcgttcgagttggtttgcgagtttagggtttttgtcgttttttaggagtaatttttatttcggacgtataggtatttttcgcgtttttttagttttcgtcgttttcgttatcgttttcggtcgtcgcgtttcggtatatataggtaagtcgttttcggcggtcgtcgaggattaaagttgttcgggatatttatttggagcgttgaggttttagtttttttggtggatttcggaatttatatttttttcgttcgtttattttagttcgttttttttagtcgttggaggattttttagggtaaggttttagagttattttttttagttttgaggtttataaattaatttattaggatattttaagatttttttattttttgaagttttttttaagtttttgtattagtattttagggaagagtttgtattttttttgttttttttgtaattttaaattatagtttttgattttgtttattttcgattttttaaaagtttttaaattgttggttttgcgttttttatattttaaaattagtattttttttttttattttttttttttttttttttttttttttttatgttttttggaaagtaattttgttgttttttattttagtaaacgcggggttaaagagggatggtttcggttttgtttttatgtttagtttcgtttttgcgtatcgtttttttttgtttagttgatttttgattttcggtttttgtgttttttgttatagg

SEQ ID NO: 238 - DNA, 5683 bp, Artificial Sequence
  chemically treated genomic DNA (Homo sapiens)
tttgtagtaggaagtataagagtcgagggttagagattagttaggtagggagggacggtgcgtagaaacggggttgggtatggggatagggtcgggattatttttttttgatttcgcgtttgttgaaatgaaggataataggattattttttagagagtatgagagagagagagagagagagagagagaggtggaggaaagagatgttggttttaaagtgtggggggcgtaagattaataatttgggggtttttgggaagtcgaaggtgagtaagattaggaattgtagtttggggttgtagggagggtaggggaagtatagatttttttttggagtgttgatataaaggtttaaggaggattttagagagtaaggaaattttggggtgttttgatgagttggtttgtgaattttaaggttggagaggatggttttggagttttgttttgaagagttttttagcggttgagaggagcgggttggggtaggcgagcggggagagtgtaggtttcggggtttattagagggattgaagttttagcgttttaggtggatgtttcgggtagttttggttttcggcggtcgtcgggggcgatttatttgtgtgtatcggagcgcggcggtcgggagcggtggcgagggcggcgagggttggaggggcgcggggaatgtttgtgcgttcggagtagaggttgtttttggagagcgataggagttttgaattcgtaggttagttcgggcgtagcggttggtaaggcggaggagtcgcgcgtttttaaaggggcgttcgtatttttggggattttttcggttaatgggcggcggtcgggtaggaagcgggaggtgggggttagtttgggttttttttttcgtttttcgttgtttggcgcgtaattttttagttagaaagtgaagggggcgggggtcggggtttgggagtattagaattttttagaaaagtcggtgttcgtttacgtagttttggcgcgtacgggttcggcgttcgtatttttgcgttacgcgggttcggggtgattagtaagtatttcgaaaagggacggggttggggagattatttaggagggttcgcggggtggcgtaggggttttcgggcgagttgatttttcggaatgtttggttgatggcgagaggtggatattagagattgggttcgttttgtaaaaagaaaaatgggtcgacggggcgtaggggatattaagagagttattcgttaaagtatttgtttttcgggttttcgttgatttttttttatcgttttcgtggggtgaggatacgcgtttttcgagcgtttgttttgagttggttttacgttcgtttcggagggaggtgagcgcggcgtcggcggggtcggtaggttggtgcgtcgcgttcgttttcgttgttttcgggtttttttttgtcgcggttgttagggggtttatagagacgtttttttcgttgtcgcggcgttttttcggtcggtcgtttgggggcggtgtgcgtatttttattaaggggttcggggaggatagttgttttttattcgaattttaaggaaatttattcgtatttagtttttataagttaaattgaaattgtgttttgaaaaatagtttttgtgtttattcgtgttttttaacgtgatttttgtttggagaatttgtagaattatttggttttagagtttttagttatttatagagtagatttatagagtaataaattattttttgtttattattgtattttttttttttttttttaaacgttttttttatttttcggtttttgaattcgaggtgtgggttatatttttgtgggtgtatatattgttatgagtgtcgttgtttagtgtttttgttattgaagtttggtttttaagttattgttttaagttagtatgattttagttttttggaattttatttattttttcgggatgggacgttagtcgtttcgttttttttgttgtgatttagcgttatcgggttcgtttcgaggttagggtataggtagaagtttgattaaataaggattttagtacgggtagggggaaatttttggggtttattttttattttagtatttaaatttggtaggattttcgattgttgtaaatagttaagtgtttatatttattaaatagtagtttcgttttttttgcgtgggagtgttgtatgataagatggtgtgtgtgtgtgtgtgtgtgtgtgtgtattacggaaagagtgttttttagttatttaatatgtatataaaatgtttttaaaagatgatcggtatgtttttaaggtatatgtttgttggattttagatgttgggaggtagaaagaaaagtttttattggttgatgaataaaattagatttttgtttcgtaaattataggtaatgatttatttaagtagatttgaagattttggaatcggtatttatttatttttttttttttttttttttttttatagtatttattttgtttttcgaaaagtaattgggtttttttttttttttttttatttgttttatgatattggatagttagaaatagtttttggagggatgggtcgtttatggttttgggtttttttggtttattggattattgtgtataaattagatgggggtttgagggttgtaagaggtttataaaagtagaatgtattttgtatgaaaagattattttttttaggtttagttgtgtagatagagtagaaattagtatttattgtttttttaggatttatgttgttatggttgagggattgtaggaatgtttttgtagattttttggaatttggttttttttaataaaataaggataatagtttttaaattttattatgttttattaataagaaggtgatttatacggtggtaggaaagagtttttttattagagaaagttgataggtataggagttgtttattttaaatataaagtttttttttttattatgatattttagttgttttgggtggaaaggaaaggttatagaagagggagtgtttgcgttttttaataggaatttatttatatttttgttagttaatatgtgttgtaaatattttttaaattttatatatttttgtgtagttttgagagaagtagggatgggaaaagggaaaagaaaatttattttttttaatgtgagggtaatagtttattttgagtgtgtttttataatttggaagtattgtgattttaaggtaattaattaatatgggtcgaagtgatggattttttagggagttggtttagtttttttttttgttaagttgttatttttgaggattagttattgaaaattgtaaggtatatggtattttatcgtaggattttttttttttaagtttttttaattggaggtgggattgatttaaatatattggtagtaagtgtgaggaaagggttgttagttatagttagttttaaaattgcgtgtaattaaggagagtaatataattgagaaaaaatattttgtttatttagtatagaatagtaaggtgggttgtgattttgtgtaggaattttttaagtgttgtaaatttttagtagtggaatattttttataagtgtgaagtaatgaaaaattattgtattttagaatagtttaaaattatagtatttttaaattgaagatattataaatttatttttttttgaatatgttttttagattataattttaagttgttttattttaattgtattagaggttagagttaggaggaagttattaatagattttttttgttttttaattaaatattaatttaagtttttttttttttatgaggtgttttttatttgttttatgttgtgtgttttaaagtatatattatttttattataaaatttattatttaatattttttattatttagtttttaaaaattagtttttatttttttatatgtaaagattagaatttttttttggtggggggtgggatggagttttgttttgttttttaggttggagtgtagtggtataattttagtttattgtaatttttgttttttagatttaagcgatttttttgttttagttttttgagtagttgggattttaggcgtgtgttattatatttaattaatttttgtattttttagtagagttggggtttcgttatgttggttaggttggttttaaatttattattttaggtgatttattttttttggttttttaaattgttgagattataggcgtgagttattgtgtttaggtaaggattagatttgaagtgtttaaagttttgggtttgggaagagagagtttttatgtttaaatttttaaatttttttgtgtataagttaattatggtatagaaggacgggattatttattatttttttattagttttattattttatttagttattttttagtttttggtgggtaaatgtggtgagtgatttataaatattgtatttttttttaaagaattgaagtaatatttttatggaattgattttagtgggtaggggtaggtatattggttaagggtaaatattttttttttttttttttatttttttgttagtgattgatttaggaattggtatgtgatttaaatttgacgaggtttgttgaaggttttcgggaaaagttttttgttgtttttaaggaagagttatgtgaaattaggttttttttattttttttggatattaataagaatgtcgataagtgttgtttggtgttattggttattggggagttaagtttagtgtgaaattagtgttggaggaggaagaataaaagtatagaaagaattcgtatgttaggttatatttttgagttgttaaattttttaatttttaagggaattttatttttagatttttttggttatgtgtttattatttaagttaagttgttgttttttattttttagaatcgtagatattataacggtttttttttttgtgtttggatggtttttttatttatgttttgattaaatttttttttatttttttagaataagagaagtaaggataggttataggataaatatattgtaaaggttttttatttatattattaagatgttttttagaaaatttgtattatttattgttttgtttatggtatgaggtagtttttttttttatttttttgtttgtagttattttagttttatatatttttaattgtaggttggtaagggtgagcgttattttcgattttattgtgtttttgtattttttttttgggtaattttgagatgtagtttagtaggtttataaagaaaagaataattaggatggatggattttagtgaaggggtaggggtattgatttgttaggaaattaagggtatggaggaaagaagatgggaaaaggagatggtgaggttttatattgggtcgaaagatggaaatggggaagattagtaaggtaggaaggtgaggatatggagaataggtttttaatatgtaataatgataaatttttaaaagtcgtttttggtaaaagttttttttatattttggacgataggtgtaggttattgtagtgttgttgatggggaggattgtatttgggagtagtttttttggttttattaatgtttattttttattattttagtaaaaaatgttattttatggggtattttaaatatggtttggtttgggttttagcgtggaagtttttttaagtgtttgttat

SEQ ID NO: 239 - DNA, 7833 bp, Artificial Sequence
  chemically treated genomic DNA (Homo sapiens)
gtttttggtgagatatgtgttttataagttttaatggagaaaaatgtaagtattttattttttgaaatttggttatttgagtaatgagaaaatagttattttttttaggatagtggtttttaattatggttatgtgtttttttaggaaaattttaaaaatatatatatattaatgtttttgtgttatttttagggattttaagtttttgaatacgaattttgtattagtattttttaattatttaggtgattgtgatgtgaaattatgattgagttttattgttttaagatgaaataaattttttttagtattgaaattataaatttaaattattaaaattaattaagggtatgggaattaataaggtatagggaagtttttatattataaaattatttttttaaattatagtttattgtttatatgttatttgttattgtagaaaagggtgaaaaaatagtaaatttaattatttttagtttgaaaaattatttagaaatgaagatgacgattttgaaatattgttaatattatttgatttataaataatgttttaatatatttattatatattgatagatatttttttatatgaatattatatattaaaattaaggtaataatgtatttagaatattttatttatatttatgtattttaagtaggttagaaattaagatatgagttattaagtatgagatgttaaggtgtggggttagaaattatattgtattttattattaataattaatatatattttaatattatatatatttaattttaatttgtatatttttaattatttttaattatgtgtataaatataagtatatatatttttatgtatttatttatttatatttttatttatttatttatataggggatttttttaaatttattattattaaattatatatttttattttaatttttagaataagtttaggaggtaggtattgttattatttatattttataaatgaggaaattgtttatagttataaagttattgtgttagatatattagaagtttaatatatatttggtgaatatatgtataaaaatagagagatagatatgtataatagtttatttttatattgagtaaaagtttttaatttgttttagaaatttttttgtgaaaattgagtaaaaatcgaggtatttttttatttgttatataggtataggtggtattttatttttttaataaggatgaatattgaaatgtggattttaaggtttaattttagattttttgaatttttgatagtgggatttggaatttgtttattgttttaaagttttttaaggaatttatatgattaattaggtttagaaattattggattttattgtcgaagtttgagaattaaagtttgggttttattgcggttttatagaaagggtaaatgaagtattatggatagaattgatacgtttttagttagtttttttttttagaagttaataggtagtaatatagtagaaattagtgatttatgttttgtgttttgaagttaggtagaattttatagagttttagtagtgttattgacgagatttgttttttggggtaagttgtttgatgtttttaaagttatattttttttatataaaatgagataatattttttgttttataggggtgttttaaagattaaataaaaataatatgttttattttatatggtataatgtttgatatttaagaagtaaaggatatattttatttttattgaagtaattagaaagtatgaaattatgaaggagataagagttttgattggtagtgtattttatttttttaggtttatttatttattttaaattatttttgttggagaataatttttaagttttttatttaagttgtgagtaattttatattttataatgatgttttttttatgagaaaaaaaaatgtttttaagttttttggagaaaatatatttgtattatttttattgaaaaatttaataattggattttgtttttttgtattaattttagagtgtatatgttataaataaagtgttttagtttaagaagattgaaagtaaatatggtatagtattttaaaataagaattttgtaaatatatggtatgattgtgttatattattagtaattatatgatacgtaatgtaaagtatagtttatagatttaaatttaattttaataagtaaattgattttgttttgttggggaaaagttaaagtattaatttaattgttaatgtagttttgtttatttttttggtatttagtgataagtttaaataatgtatatatttttatttatatatttagtaatataattttttgtttaatgagtgatgtttttttgttatttggtggtgtttgttagttttagaatttgttttttggtggtattataatattaagtatagagtaagtgtaataaaattgtagtatttttattgaaaaggttttgttttaaattgtttaataatttaaaggatttttgtggaagtaatcgtatttgttaattagttataattagtaattaatttttttggagttttaatttatttttggtaaaacgttttaggaagagtatatattattagaaagtatgttaaaaatttatttagtagaaaatttaaaaatagtttttttttgttaagaggttttttaaaattttatttatatagttaaattttgaaattttagtaggttttgttttattattataattattgtataaatatttttaaggattttgtttttagttttaagtatgatttatttttataagtttgattagttattatattagttttgttatggaaaatgatatgtttttattttttgttgtagagttgttaaattttgatttatatttatgttgttttttttgttgaaagtttgtagcgaaagaaatttttaattttttgttttgtaatattagttggtagttttatttaatgggtattttgtttttttaaagaatttagttgttttgtttagaagtcgattttttgatgtttttaacgtttggtttaattgatttgttttaatggagttttcgtcggtgaggagcgagatgttatcgattagaatgttgggatttgttgtttaattgttaggagtgagagatattgagatttagaaatttttggaggtgggaggggagagggatagtttcggacggaggcggagatgtaagataaagggatggattttatataggaaaaaaaaaaagatttcgttgaggtattgaggtgttgtacgattatattttttaaaggagaagttaaaaagtaaggaagtgggaggaggttggaggttaaagtatttaaaaggattattcgggtataatttgtttttttgttggtgtttgtaaaggatagatagtttcgtttttaaagtatatgaatgttttttttaagtgattgggaatggatattaattgtttgttaaatgttattaaatgtttttttaaatttaggggatatagaaagaggggtataaaaggagaatttaaatagaaaaagggaggattcggaggtttttgaaagcggggggagaagaaggaggagggataatagagaggaatagagaaggagagcggagagaagataaataaaaataaaaataggaattattgaataattatatattaaaaagaaagtttttttttatggggtatttaaaatattgagattgtaatagtgatttcggttatggaagaaagatgtttttttttatttttgttttcgaaagtttttggtttcgttattggcgattaaaattttattaggttaaagagtgtgtttaattgtttgaagaatgtagtagacggaaggcgggtttcgttatgtcgtttgtttttttcgttggagagaatgaaagaaacgcgtagagttagagatttttgtcgagttagattttttttcgtcgttttaggttatcggttattcggtaaagattcgagtaaggaacgtagggttattgtttgggttaataaatggagttcgttttttttttttcggacgtcgttgttcggtcgatgttttcggtaatttattcgcggcgtatgtagaggagttttttttttttttttagattatttgtttcgattaatttgattttttaaatatatttgatcgtattttttaggtggatatattaataggttacgggttggagaggagcgggtgatgaggagagggatttaaatttgcgaacgtttgggttgggtcggagttgcggggggtttgggaggagagaggggagaagagagaaggaaggagagcgtttgtcgggatggttgagttgtttcggcgagtagttttggggttgtacgtttttgtgggagatgttgttgttgtttttaggtcggtaagagcggttttaatattatcgttttttatttttttttttgtaaatttttagagaaacgtttttggttttttcgtcgcgatatttttagtttgtatttttttatagtttaggcggcgcgttttcgtacgttggagcgtcggtcgttagtaggacgttttttttcgcgtcgattcgtttttttttgttttgttgttgttgtttttttgatattttcgtttttattatttttagttcggagagacgttatttagtcgcggttcgtattcgcggttcggggttacgcgcggaagaggggcgttagttcggatttcgttttcggtagggggcgttttggagcggagagtgaggcgaatggtatatgagtgtgcgggtagtttattttgaagttcgagttttttatttgagttatgtttcgtttagttttattcgggttagcgtttggcgagcgagtttatttgtggttttcgcggtcgttttttttttgtatttttgtatttattcgtcgatttttttttttcgggatttgtattttgttttattaattagagttcgattgtttttttttacgtgatttcgggcgggttgaggatttgttgttttttaaacgttagagggatgcgggcggtagagttcgagaggcggttgtcgggttgcggggcgttttgattttttttttattttgttttttcgggttttattcgtttgtttttggattttcgtttttttttgtttttcggttttttagagttttttttttatggtagtagtttttcgcgttttcggcgtagttttttagcggacgattttttcgtttcggggttgagtttagtttttggatgttgttgaaattttcgagattatgcgcgggtttggttgttgttttttcgtcgggtgttattgttatcgtcgtcgtttttgttgtcgtcgttcgcgggatgtttagtagttcgttgttcggttttcgcgattttgtgtttttcggaagtcgtttgttgttgtagagttgtacgaattagttatggtgttgtgggagttttcgcggtagtgtagtagttggatattttgcgagggtttttgttggttgttgttgttgttcgttatgttatttatcgtagttcgttcggtgaagttcgttgttttttttatttttttaagtgattgttaaacgtttatcggttggaattgttttggtaagtttagaattttcgttttcgattttttaatttcgtagaagaatacgcgtatttagtatagattagtttattttagcgcgtttttttagttttttattttttattgttttagatttttaatattatttatttttatttagagaaataaggggaattgttgtaggttcgggggtgaggggtggttttgggatgggtagaaagtgtaggtgtagtaggaaatttttgtatgtttgcgtttatattggagttgcgaggattttgagaaatattaaacgggatggttttttgggtttattgttttgaaagagtattaattttaggggaaatattgaaatagaagttttgttattattaaagaaaaaagttttattaggatgaggaagaaataattttatgagaaagaatgagcgagaaagtaataaattaaatggtgattgtaggggaatcgttgatttttggtaaaggtgttatgaggtcgtattggtttttcgttgaagattaggttatatagattttagaggagttgggttttaatagaatttttttttttttttttttttttttttttttttttttttttttttttttatttatttattttttttttttttttattttttttttttttaggcggtaaaagatattggttttgtagtttagatatgtttttttttttgtttttttaagttttaaggtagtataggggagttgagaaaaagaatattttgcgggttttttaggtcggagtgggtatgattgaggttggttaggttttatgtaggcgagtcgagggcggaatcgattttagtgggcgttgatttttttatttttggataggtttttgtggagtgggttaggtattttttttgttcgttcgggtttttttagattttgacggcgaacgtttggtaggtttcgttttgttgaagttttttaattaaatagggttagaggatgggagttgttgtatttttagttggtatagtattcggtttgatagtttgtagtatagggtgtatgtaattttttattttttgtgaatataattttgttgtagttaaatttggttttgaataaagtgttttttaaagatgtatataagttgaagtgtatgtaattttagagaggagggaatgattaattgtaatttagggtgaaagtttgtatagtttttagttattattgatgtaaatgttaaaaggaaaattattatgtattattttaatttattttttataaagataagttgagatatgtaattttattagatttgggttaatagattgtttttttttttggtagtttttaaatttggtattttaataaaatttaatatgtttttataattttttgatttatgcgtatatgtgtgttgtttttgaaagaataagttttattttgttattgtttaattattttttagatgttttattatggtaataattatgagtttgtaaaaataatttttggaaatgttgatggttttgtagtttaatatagattggtttgttttatttttagtttttgtattgttttaggaaataattaatttaaatgtgaagttgatatttgtaattaagaaattatatatttattagatattttaaaggggattgtataaattaaagagaataaattggttttgtagataggttgttaagaatttggtatttcgtttttatttttgttaatttagaggtgattaatttttatttgagttaaatagattattatagaaaatattgtgtttgtttatttttattattgaggttttgttttttttttgtttggatatattttaaataaggggttgttttagtcgttgaagtaaaagaataattaaagatggggaaatggtaaaagggtatttagagattattattagtttttttttaaaatgtggagttttgtggttataaatattgtttatttaatgagtaaaaaataaaaataaaaaaaaaataggaagtaaatgttaagtttttatttattattgttagtattaacgtaagttttaaaaaatagtattattagaaaaggatattaaaggagaattgattagaaaagaattgtggaaaatggaaacgaatattgattatttaattagattttgaggttattagtagatagtgattttgtagtatagttatagttgttggatttaaaatttaggataagtattttaaagttttaaagtagtgtttttttttgttaaaaatttgtaagatgttttaatgattggagtgttttttttgaatttgagg

SEQ ID NO: 240 - DNA, 7833 bp, Artificial Sequence
  chemically treated genomic DNA (Homo sapiens)
ttttaaatttaaagagaatattttagttattaaaatattttatagatttttaataaaaaaaagtattattttgaagttttaaaatatttgttttaaattttaaatttaataattatagttgtattgtaaggttattgtttattgataattttaaaatttagttaagtgattaatattcgtttttattttttataatttttttttagttaatttttttttagtatttttttttgatagtgttattttttaaagtttgcgttaatattgatagtggtgaatgaaagtttaatatttgttttttgttttttttttatttttattttttgtttattaggtggataatatttatgattataaaattttatattttggaaaagagttagtgatgatttttgaatatttttttattatttttttatttttaattgtttttttgttttaacgattgaaataattttttatttgaaatgtatttagataaagaggaaataaagttttaataataaagataaataggtatagtgttttttgtgatggtttgtttggtttaaatgaagattgattatttttaagttaataggggtggaagcggggtgttaagtttttgataatttatttgtaaaattagtttattttttttagtttatgtagttttttttaaaatatttggtaaatatgtaattttttgattgtaaatgttaattttatatttaagttagttattttttaaaataatgtaagggttaggaatgaagtaaattagtttgtgttggattataaagttattaatatttttaaaaattgtttttgtaggtttataattattattataataaagtatttaaaaagtgattaggtaatagtaaagtgaaatttatttttttaaaaataatatatatgtacgtatgaattaagaagttatagaaatatgttgagttttattaaaatgttaaatttagaaattgttaaaaaagagaataatttattgatttaaatttaatagggttgtatattttaatttgtttttgtaaaggataaattagaatgatgtataataattttttttttggtatttatattagtaataattaggaattatataggtttttattttgagttatagttggttatttttttttttttaaagttatatatattttagtttatatatatttttgaaagatattttatttagagttagatttaattatagtaaaattatatttatagaagatgaaaaattatatatattttatattataggttgttaaatcgaatgttatgttagttaggagtgtagtaatttttattttttggttttatttaattaggaagttttagtagagcgaagtttgttaagcgttcgtcgttagaatttgaaggaattcgagcgagtaagaagagtgtttgatttattttatagaagtttgtttagaaatggaggagttagcgtttattgaagtcggtttcgttttcggttcgtttatatggagtttgattagttttagttatgtttatttcggtttgggagattcgtaaagtgtttttttttttaatttttttgtattattttgaagtttagggaagtaaagagaggggtatatttggattgtaaaattaatgttttttgtcgtttaggagagaagggaatgagagagagagagagatagatagatagagagagagagagagagagagagagagagagagagagagagagagaaattttattgaaatttagtttttttagaatttgtgtgatttggtttttaacgggagattagtgcgattttatggtatttttgttaggaattagcgatttttttgtagttattatttgatttattgttttttcgtttatttttttttataaagttattttttttttattttagtaagatttttttttttaatgatgataaagtttttgttttagtgttttttttaggattggtgtttttttaaaatagtgaatttagaaaattatttcgtttaatattttttaaaattttcgtagttttaatgtaagcgtaagtatgtaaaggttttttgttatatttgtattttttgtttattttagaattattttttattttcgggtttgtaatagttttttttgtttttttggatagaggtgggtggtattaggggtttagggtagtaggaggtgaggggttgaggaggcgcgttagggtaggttggtttgtgttggatacgcgtgtttttttgcggagttaaagggtcggggacgggggttttggatttattagagtaattttagtcggtgggcgtttggtagttatttaaggaggtagggaaagtagcgagttttatcgggcgggttacgatgagtagtatgacgggtagtagtagtagttagtaaaagttttcgtaaagtgtttagttgttgtattgtcgcggggatttttatagtattatgattagttcgtgtaattttgtagtagtaaacggttttcgaggaatataggatcgcgggggtcgggtagcgggttattgagtatttcgcggacggcggtagtagaggcggcggcggtggtagtggtattcggcggggaagtagtagttaaattcgcgtatgatttcgagagttttagtaatatttagggattgggtttagtttcggagcgagagggtcgttcgttgagaagttgcgtcggagacgcgggaagttgttgttataaggagggagttttgggaagtcggaggataggaggagacgggagtttaggggtagacgagtggagttcgaggaggtagggtggagggagagttaaggcgtttcgtagttcggtagtcgtttttcgagttttgtcgttcgtatttttttggcgtttgggaagtagtaggtttttagttcgttcggggttacgtgggaagaggtagtcgggttttgattggtggagtaggatgtaggtttcgggagggaggggtcgacgagtaggtgtaaggatgtaaggaggaggcggtcgcggaagttatagatgggttcgttcgttaggcgttggttcgagtggggttaggcggggtatggtttaaatgagaagttcgggttttagggtgggttattcgtatatttatatattattcgttttatttttcgttttaggacgttttttatcgaaggcggggttcggattagcgtttttttttcgcgcgtgatttcgggtcgcgagtgcgggtcgcggttgggtggcgttttttcgagttggagatggtgggggcggaggtgttagaggagtagtagtagtagggtagagaggggcgagtcggcgcgggagagggcgttttgttggcgatcggcgttttagcgtgcgggagcgcgtcgtttaggttgtagggggatgtaggttgggaatgtcgcggcggagaggttagggacgtttttttagggatttataggaaagagggtgagaggcgatggtgttagaatcgtttttgtcgatttggaagtaatagtagtattttttataagagcgtgtaattttaaggttgttcgtcgaggtagtttagttatttcggtaggcgttttttttttttttttttttttttttttttttttttaggtttttcgtagtttcgatttagtttaagcgttcgtaggtttgaatttttttttttattattcgtttttttttagttcgtagtttattagtgtgtttatttgggaggtgcggttagatgtgtttggaaggttagattggtcgggataagtggtttgagagaaagagaaaggtttttttgtatacgtcgcgggtgggttgtcgggagtatcggtcgggtagcggcgttcgggaaggggagagcgggttttatttgttggtttaggtagtgattttgcgttttttattcgggtttttgtcggatggtcggtgatttggggcgacgagagaaggtttaattcggtaggagtttttggttttgcgcgttttttttattttttttagcgggaagggtaaacggtatagcgggattcgtttttcgtttgttgtattttttaggtagttagatatattttttagtttaatggaattttagtcgttagtaacgggattaagagttttcggggataagggtggagaggaatattttttttttatgatcggggttattattgtagttttagtgttttggatgttttatagggaagagttttttttttggtgtgtgattatttagtgatttttgtttttgtttttgtttatttttttttcgttttttttttttatttttttttgttattttttttttttttttttttttcgtttttaaaagttttcggattttttttttttttatttaaattttttttttgtgtttttttttttgtgttttttgaatttaggagagtatttgataatatttaataggtaattagtgtttatttttaattatttaaaagaggtatttatatattttgaaaacgggattatttattttttgtagatattagtagaaaaataaattgtattcgagtaatttttttaagtattttaatttttaatttttttttatttttttgttttttaattttttttttgagagatgtgatcgtgtagtattttagtgttttaacgaaattttttttttttttttgtgtgaaatttatttttttattttatattttcgttttcgttcgagattgtttttttttttttttatttttaaagatttttgaattttagtgttttttatttttggtaattaagtagtagattttagtattttagtcggtggtatttcgttttttatcgacgaagattttattaaaatagattaattagattagacgttggaggtattagaaaatcggtttttagatagagtagttaaattttttaaggaaatagaatatttattagatagagttgttaattaatattgtaaaataaggaattagaaatttttttcgttataggtttttagtagagaaggtaatataaatatagattaagatttaataattttatagtagagaatgagaatatgttattttttatagtaaggttggtgtggtaattaattaggtttatgaaaataagttatgtttgaaattaaaggtaaagtttttaaaagtgtttatgtagtaattatgataatgaaataggatttgttaggattttagagtttggttatgtaagtagaattttagagaattttttagtagaggaaaattgtttttgaattttttgttaagtaaatttttggtatattttttaataatatatgttttttttaagacgttttgttaaaagtaagttaaaattttaaaggagttaattattggttgtaattggttaataaatgcggttgtttttatagaggttttttaaattattaaatagtttgaagtaaagtttttttaatgggaatgttgtaattttgttgtatttattttgtatttagtgttatagtgttattaagaaataaattttgaaattggtaagtattattaagtggtagaagaatattatttattgagtagagaattgtattattgaatatgtaaataaaaatatatatattatttagatttgttattaggtattaaagaagtagataagattgtattagtaattggattagtgttttaatttttttttagtaaggtaaaattagtttatttattagaattaaatttaagtttatgaattgtattttgtattgcgtattatatgattgttagtaatatgatataattatattatgtatttgtaaaatttttattttaaaatattatattatatttatttttaatttttttgagttagaatattttatttgtggtatatatattttagaattgatgtagaggagtagagtttagttgttagattttttagtagaaatagtgtagatatattttttttagaaaatttaagaatattttttttttttatggaaagaatattattataaagtgtgagattatttatagtttaagtagggggtttgggagttattttttaataagaatagtttaagataaataaatgaatttgggaaaataagatatattgttaattagaatttttattttttttatgattttatattttttgattgttttaataaaggtaagatgtattttttgttttttaggtgttaggtattgtgttatgtaggatagaatatgttatttttatttaatttttaaaatatttttatgagataaagaatattattttattttatataaaaggaatatggttttgaaagtattaggtaatttgttttaagaaataaatttcgttagtgatattgttgggattttgtgaaattttgtttgattttagagtataagatataagttattaatttttgttgtattgttgtttgttagtttttgagaggggaaattaattgggaacgtattagttttgtttatgatattttatttgttttttttgtggagtcgtagtaaggtttaaattttaatttttaaatttcggtaataagatttagtgatttttgaatttggttgattatatgaattttttgagaaattttgaaataatagataaattttaagttttattattagggatttagaaaatttggagttgggttttgggatttatattttaatatttatttttgttggagaagtaaggtattatttatatttatatgataaatgaaaggatatttcgatttttgtttagtttttatagagaggtttttgagataggttaaaagtttttatttagtgtaaagatgagttgttgtatatgtttgtttttttgtttttatgtatatgtttattaaatatgtattaagtttttaatatgtttgatatagtaattttgtgattgtagataatttttttatttgtaaaatgtgagtaataataatatttgttttttgggtttgttttaaagattaaaataaaaatgtatggtttaatggtagtggatttggggggattttttatataaataagtgaatggaggtatgaataaataaatatataaagatgtgtgtatttatatttatatatataattaaaaatagttaaagatgtataaattaaagttaaatgtatgtgatattgaagtatatgttgattattgataatgaagtatagtataatttttaattttatattttaatattttatatttaataatttatattttaatttttagtttatttaagatatatagatatagatagaatgttttaaatgtattattgttttagttttaatgtataatatttatatgaaaaagtatttattagtgtgtagtaaatgtattagaatattatttataggttaaatgatattgataatgttttagagtcgttatttttatttttggataattttttaaattgagagtaattaaatttgttatttttttatttttttttataatggtaaataatatataaataatgagttgtgatttaaagaaataattttataatgtaaaagtttttttatgttttattgatttttatgtttttaattaattttggtagtttaagtttgtgattttagtgttgaggaaagtttattttattttagagtagtggggtttagttatgattttatattataattatttggataattaaagaatattgatgtagagttcgtatttaaagatttggaatttttagaagtgatatagaagtattggtatatatatatttttaaagtttttttggagaaatatatagttatgattgagaattattgttttggggaaagtgattatttttttattatttaaatagttaagttttaggaggtaaaatatttatatttttttttattaaaatttgtaaaatatatattttattaaagat

SEQ ID NO: 241 - DNA, 2501 bp, Artificial Sequence
  chemically treated genomic DNA (Homo sapiens)
gtaaatttttatattttgaggagagatagggttttattatgttggttaggttggttttaaatttttgattttaggtgatttattcgttttggttttttaaagtgttgggattataggcgtgagttattaagtttgacgggtagtaatttattttttatataattttttttttttttttttggtagagacgaggttttgttatgttgtttaggttggtttaaaattatcgggtttaagtgatttgtttattcgggttttttaaagtgtagggattataagtatgaattattatgtttggttgtaattttttatatatttcggatattaattttttattagataatatagtttgtaaattttttttttttttattttgtaggttgtttttttattgttggttattttttttgttgtatagttatttttaagtttgttgtaaatttatttgtttattttttgttttgttgtttgtgttttgttgttatatttaagaaattattgttaaatttattgttatgaagtttttttttatgtttttttttaggagtattatagttttaggttttatgtttaatttttaataagttttgtgtttttgtatatggtgtaaggtaagggtttaattttatttttttgtatgtggttatatagtttttttagtattatttgttaaagatataattttttttttatgttttggtgttttaaaaaaaaaaaaaattttggttggttacggtggtttaggtttataattttagtattttgggaggttgaggtaagtggattgtttgaggttaggagttttagattagtttggttaatatggtgaaattttgtttttattatcgaagatataaaaattagttaggcgtggtggagtacgtttgtaattttagtttattagggaggttgaggtatgagaatcgtttgaatttgggaggtagaggttgtagtgagttaagattttattattgtacgttagtcggggtgatagagtgaggtagggttttattttgtcgtttaggtaggagtttagtggtttaattatggtttattgtagtttatattgttagggtttaagttatttttttattttagttttttaagtagttaggattataggtgtgtgttattatgtttagtaaatttttgtattttttgtagagatggggtatttttatgttgtttaggttggttttgaatttttaattttaagcgatttttttatttgggttttttaaagtattgggattataggcgtgagttattgcgtttgatatggtgttttttaatttatttttattttttatttttatttttttgagataaggttttgttttgttttttaggttggaatgtagtggtataattatggtttattgtaatttttgttttttcggtttaagtgatttttttgttttaatttttggagtagtttggattatgggtatatgttataacgattagttaatttttgtttttttttttttttttttttttttttttttttttttttttttttgagatgtagtttttttatgttatttaggttggtttaaaatttttgggtttaagcgatttttttattttggttttttaaagtgttgggatgataggcgtgagttacgtggtgtttaaaaaaggtaataaaaaattttttatatattgggtatagaagtggtatgggtttttatatattgtgagatttttggtattagttataaattttgtgtatatttaagattttttagagtaggtgtaattatttcgttttatagatgaggatatagaggttgagtcgtagtgatttatttaaggtcgtatagttagtaaatagatggaggttggattggaattgaggattttatttaagggtttttataaatttttgggggtttttcgttgttttatttttattatatttgaaagaatgaatgaatgaatgtttcgggtatcgtgtttattttttagtaaatcgtggagtttggacgagtttattgtttcgcgtggggggggtgtgtgttcgttttgcgtatgcgtgttttttgggtatggtcggtttcgttttatttttttgtatagggtatcgttttttttcgtttggtatattttttttttttttacgttcggattggggtggtagacgtcgttttcgtttatcgtttttttttatcggttttcgcgcgaaaagtcggggcgtttgcgttgtcgtcgtcgcgtttgttgaagttttcgagatgtcggcgcgtatcgttttagttcgggtgtttatattggtcgtttcggttatttcgttgttcgacgatgttcgtaggcggtaggtattatgggggggaatacggatttagggggataggtagggcgttgggtggggggtcgttttttttcggggtggtcggtggtcgttgttgatagacgggcgcgtatgcgtggggtggtgcggcgcgtagcggtagttggcgcgggtagggtggtattttcggtcgcgcgtgttcgggttg

SEQ ID NO: 242 - DNA, 2501 bp, Artificial Sequence
  chemically treated genomic DNA (Homo sapiens)
tagttcgggtacgcgcgatcggaagtgttattttgttcgcgttaattgtcgttgcgcgtcgtattattttacgtatgcgcgttcgtttgttagtagcggttatcggttatttcgaggggaagcgattttttatttagcgttttgtttgtttttttgagttcgtgtttttttttatggtatttatcgtttgcggatatcgtcgggtagcgagatggtcgggacggttagtgtgggtattcgggttggggcggtacgcgtcggtatttcggaggttttagtagacgcggcggcggtagcgtaggcgtttcggtttttcgcgcggaaatcgatggggaggggcgatgagcggaggcggcgtttattattttagttcgggcgtgggggaggaggggatgtattaaacggagagaggcgatattttgtgtagaaggatggaacggagtcggttatgtttagggaatacgtatgcgtaaggcgggtatatattttttttacgcggagtagtgggttcgtttaagttttacggtttgttgggaggtgggtacggtgttcgaggtatttatttatttatttttttaggtgtgatggggataaagtagcgagaagtttttaagggtttgtgagagtttttgagtaaagtttttagttttaatttaatttttatttatttgttggttatacgattttaggtgggttattacggtttagtttttgtgtttttatttgtaaaacggggtaattgtatttattttagaaaattttgagtatatatagaatttgtagttagtattaagaattttatagtgtatagaggtttatgttatttttatatttagtgtgtggggggttttttgttgttttttttaagtattacgtggtttacgtttgttattttagtattttgggaggttagggtgggaggatcgtttgagtttaggagttttagattagtttaggtaatatagagaaattgtattttaaaaaaaaaaaaaaagaaagaaagaaagaaagaaaaaaagaaaaataaaaattagttagtcgttgtggtatgtgtttatagtttaaattattttagaggttgaggtaggaagattatttgaatcggagaggtagaggttgtagtgagttatgattgtattattatattttagtttgggagatagagtaagattttgttttaaaaaaataaaaataaaaagtaagaataaattaagaagtattatgttaggcgtagtggtttacgtttgtaattttagtgttttgagaggtttaggtgggaggatcgtttgaggttaggagtttaagattagtttgagtaatatagggatattttatttttataaaaaatataaagatttgttgggtatggtgatatatatttgtaattttagttatttgggaggttgaggtgggaggatggtttgaattttggtagtgtaggttgtaatgagttatgattgggttattggatttttgtttgggcgatagggtaagattttgttttattttgttatttcggttggcgtgtagtggtgagattttggtttattgtaatttttgttttttaggtttaagcgatttttatgttttagtttttttagtaggttgggattataggcgtattttattacgtttggttaatttttgtattttcggtggtagagatagggttttattatgttggttaggttagtttgggatttttagttttaagtagtttatttgttttagttttttaaagtgttgggattataggtttaagttatcgtaattagttagaattttttttttttttaaagtattagaatatgggggaaagattgtgtttttaataaatggtgttgagaaaattgtataattatatataaaagaatgaagttggatttttattttatattatatataaaaatataaaatttattaaagattaaatataagatttgaaattatagtgtttttagaagaaaatatggggaaaagttttatgataatggatttggtaatgattttttggatatgatagtaaaatataggtaataagataaaagatagataaatgggtttgtaataaatttaaggatagttatatagtaaaagaaatgattaatagtgaaaaggtaatttatagaatggggaaaaaaaaagtttgtaaattgtattatttggtaaagggttaatattcggaatatatgaaaaattatagttaggtatggtggtttatgtttgtgatttttgtattttgggaggttcgggtaggtagattatttgagttcggtagttttagattagtttgagtaatatggtaaaatttcgtttttattaaaaaaagaagaaaaaaattatataaaaaataaattattattcgttaggtttggtggtttacgtttgtaattttagtattttgagaggttaaggcgggtggattatttgaggttaagagtttgagattagtttggttaatatggtgaaattttgtttttttttaaaatataaaaatttgt

SEQ ID NO: 243 - DNA, 4138 bp, Artificial Sequence
  chemically treated genomic DNA (Homo sapiens)
gaatttcggattcggatttatgttttcgtttaaattttatgttaaattgtaaattttaatgttggaggtggggttttgtgagaagtgattggataatgcgggtggattttttgttttgatgttgtttttgtgatagagattttatatgatttggttgtttaaaagtgtgtagtatttttttttttttttttttttttttttgtttatgttttgttatgtaagacgtttttcgttttttttttatcgtttagaatgattgtaagttttttgaggtttttttaggagtagaagttattatgttttttgtataattgtagaatgatgagcgaattaaattttttttttttataaattatttagttttaggtatttttttatagtaatgcgaggatagattaatataattttttatttttagattttcgtatacgtttagttttagatattattgtttttgggagtatgtatagcgtagttttttgtcgataaaagtaaagttataaaggtgataaaaatttgtatttggggatatttgattgtgaaagaggatggatagtatatttgtagttatagagattggggtttatcgagttgaaatttggtagtattttggtataatatgtgtatgattcgtgtttaatgtttagagattagtgttgagtaaaatagtttggtttggggtcgttgttgtttttattttttttttgtttattagagggcggtagagttttttttttttattttggagtttttttaggggttgttgatttttttagtcgggtttatagtttagtagggtttatttttattcgggttatttcggtttacgtttttttcgtttttcgagttttttatacggattttgttagtttttttttgtagtttatcggtcgtttatttgaggtttgtcggtcgtttatttgaggtttgtcggttgttttttgtaggtagtttttgttttttatatttttttttttttcgggtttagttgaaagggcgttttttagggtagttttttgtgatttttagtatagtttagttttttataggtttcgacgttttttatgttgttattttatagttttgttattattattaattttttagttttatgaagtttattgagcgtttgtttttcggttataggaaaattttgtgatagggattacgtttgtaatgttttttgtggaattttaaggtttagtttagtgtttgatacggaatagatgttttataaatattggttaaatgtgtgggagatttttaaaaatagtatattattttcgtgtggtttttagtagttagagtttgttttatgtggatataggggtattggtattagtatgggaggaggttagtaagtgttcgcggttgttttaggaatgaggttttaatttttagagttttagaagggaggatagaggtttgtagggaatagatttttcggtttgattttgtagtttaatttagagtttagggttagtttatattacgtcgattttggttagtatttttagggtagttttagataaggtcggaggtttttttttttgttttttagggggtgatattgtatatagatattatttaggaaacggatttttttggataggaatttggttttgttaaggaagtggaggtggagtttggtttttattttttgttttaatagatttttttgattttttttatatatttgttttgtttttttttgggttttatgaggattttgttttgttaggggtttttgtgtaattttagatttttttttggtattattatggggaaggtggggtgattataggatagttagtttcgtagagatagagattatttaggatagttagggagaatatggataggttttgagtcgtagttttagttaatagatacggagagggagggtttttttggagttttttttaaggatagtagagtttagagttatttatttttttttattatagttttttttttttaggatatataagatatttttttttttatatgtaggatttggggatttttgagatttttgggtttgggtttttatttttgggttagtggcggggttggtggtattggagatagagggttggtttttttttagttattatttagtgagtttttttttagtttttagagttatttttgttatttttttgttgggtattattttatttttttagagttttggagagtatggggagattcgggattttgttgggtttttttgttataaaggaaaataatttttttggtgtgatagatttaaggatagaatatagtagaggttagtattggggaagataggttgtttttttaggggatgggggtggatttattttgtcgaaaagatttgtttgaggaattgaaaatagaagggaaaaaagaggagggataaaagaggtagaaatgagaggggaggggatagaggatatttgaataaagattatattttgatttacgtgatgttgagaagtatttttgttttaggaagagatttagggtagagggaggaaggatagtagattagatagttatagtagttttgataaaacgtttttggaatttaagtttttttttatagaggaggatagagtagatagtagagattatggagtttttttcggtttttttttatagatggtgtattttttggtagaggtttttgtttataggtgaagggaggataatttgggagagggtgggaggagggagtatagagattggttggggttttttgggtaggatagggttgtgagacggatagaggtttttgttggagtttgaatagggaagaggatattagagagggataggagttatattagaaaaattaaattgaattggaattggaaaggggtaggaaaattttaagagttttatttttttagttaattgttattggttattacgtttttaaaaattataataattgtattatatgatattttaaataaaaatataataattgtattagatgatattttaaataaaaatataattagggtatgaaatattgtttttattcgtttatcgcggatattggaaaataagttttaggttgtggagggttttgggaatttttatgaatttatttataggaatttgtagtttgttttaggtattggggtgtaattaagattatataaatttttgtttttatgaagtttatgtttttatggggaggaagatagatatataaagagatttagaatgtgaggttaggtgttgataagagttttggaggaatagagtagggaaaggttagaaaaggaagatttagggtttttagaggaggtgttagggaagggattttttaagaatgttttgatgtgagtaggatttgaaggtaatggggagggagtcgtgaagatttttggaaaagtagattttatatagggaaatgttaaggtcggaggtgttaaggaaataggagatatattgttgattttgatttagtaggatatatatatatatatatatatatttatttattttagggttgggggatgaagagatttgtttaggatttaggattttatttttttattttaatgtataggttttaatattgatcgatgttttttgtttttttttagttttatttttaattttttggaattcgtttattattgttaagtttattattgaatttacgtcgtttaatgtcgtagaggggaaggaggtgtttttatttgtttataatttgttttagtatttttttggttatagttggtataaaggtgaaagagtggatggtaatcgttaaattataggatatgtaataggaatttaataagttattttagggttcgtatatagtggtcgagagataatatattttaatgtatttttgttgatttagaatattatttagaatgatataggattttatattttatacgttataaagttagattttgtgaatgaagaagtaattggttagtttcgggtatatcgtgagtgatttttttatgatttttgggtgttgggggttagttttattttttatatataggattattaggtttgggttgtgttgtggttttttttgtattacgtattatgttagggtttgggtatttagtgtaggatatatatagaagagataaattttaatagattagaattt

SEQ ID NO: 244 - DNA, 4138 bp, Artificial Sequence
  chemically treated genomic DNA (Homo sapiens)
gaattttgatttgttgaagtttgttttttttgtgtgtattttgtattaaatgtttaaattttaatatggtgcgtaatgtagagggggttatagtatagtttaggtttgataattttgtgtgtgggaagtagaattgatttttaatatttagaggttatgggggaattatttacggtatattcggaattggttagttgtttttttatttataagatttgattttatgacgtgtagggtgtagaattttgtgttattttggatgatgttttggattagtagggatgtattggggtatattatttttcgattattgtatgcgggttttggggtagtttgttgagtttttattatatattttataatttgacggttgttatttatttttttatttttgtattagttgtagttaaaaagatgttggggtagattgtggataagtagaagtattttttttttttttgcgatattgaacggcgtggatttaatagtgagtttggtagtggtgggcgggttttagaaggttagaagtgaggttaggagagagtagagagtatcggttaatattgggatttatgtattagggtggaaaaatggggttttgggttttgagtaggtttttttattttttagttttggagtgagtgagtgtgtgtgtgtgtgtgtgtgtgttttattaggttaaggttagtagtgtgttttttatttttttagtattttcgattttggtatttttttgtgtggaatttgtttttttaggggtttttacggttttttttttattgtttttaggttttgtttatattagggtatttttgggagattttttttttgatattttttttagagattttgggttttttttttttgatttttttttgttttatttttttagggtttttgttaatatttgattttatattttagatttttttgtatgtttgtttttttttttatgagagtatgagttttatgagggtagggatttgtgtgattttggttgtattttagtgtttgggataggttgtagatttttgtggatgagtttatgagggtttttagggttttttatagtttggggtttattttttaatgttcgcggtaggcggatgaggatagtgttttatgttttggttatgtttttatttaaagtgttatttgatgtagttattatgtttttatttaaagtgttatgtgatgtagttattatgatttttaaaaacgtagtggttagtgataattaattaggaaaatagaatttttgaggtttttttgtttttttttaattttagtttaatttgatttttttggtgtgatttttgtttttttttgatgtttttttttttatttaggttttaataggagtttttgttcgttttatagttttgttttatttaggagattttagttagtttttgtgttttttttttttatttttttttaggttgttttttttttatttgtgagtaggagtttttgttaggggatgtattatttgtggggaggggtcgagggagattttatggtttttgttgtttgttttgtttttttttgtggagaagagtttgagttttaggaacgttttgttaaggttgttgtgattgtttggtttgttgttttttttttttttgttttgagtttttttttagggtaggagtattttttagtattacgtgggttagggtgtggtttttatttaggtgttttttgttttttttttttttatttttgttttttttgttttttttttttttttttttttatttttagttttttagataaattttttcggtaaggtggatttatttttattttttgggaggataatttgttttttttagtgttgatttttgttgtgttttgtttttgggtttgttatattagggggattatttttttttgtgatagagaaatttagtagggtttcgggtttttttatgttttttagggttttgggaaggtgggatgatgtttaataggaaggtgatagaggtggttttgggggttagaaaaaggtttattgggtggtggttggggagggattagttttttgtttttagtattattaatttcgttattgatttagggatggagatttaggtttagaggttttaggagtttttagattttgtatgtagagggggaggtgttttgtgtgttttggaaagagaggattgtggtggagggaggtgggtgattttgggttttgttgtttttggggaaggttttagggggatttttttttttcgtgtttgttggttgaagttgcggtttagggtttgtttatgttttttttgattgttttgggtggtttttgtttttgcgaggttgattgttttgtgattattttattttttttatggtggtattaggagggagtttggagttgtatagggatttttggtagaatagggtttttataggatttagaaaggaatagagtaggtatgtgggagagattagaagggtttgttggagtaagggatggaaattaggttttatttttatttttttagtaaagttaggtttttgtttaggggaattcgttttttgagtgatgtttgtgtgtaatgttattttttggagggtaaagaaggagattttcggttttgtttggaattgttttagggatgttgattagggtcgacgtggtgtgagttgattttgaattttggattaggttgtagggttaggtcggaggatttattttttgtaggtttttgtttttttttttgaagttttgggggttgaggttttatttttggggtagtcgcgggtatttgttggtttttttttatgttggtgttagtgtttttgtgtttatatggaatagattttgattgttgggggttatacggaggtgatatgttgtttttagagattttttatatatttaattagtatttatggagtatttgtttcgtgttaggtattgggttgggttttgggattttatagagagtattatagacgtggtttttgttatagagtttttttgtaatcgggagataggcgtttagtgaattttatgggattgaggagttaatggtaatgatagggttgtgaggtgatagtatagggggcgtcggagtttgtgagagattgagttgtattggagattatagggagttgttttgggagacgtttttttagttgagttcggggaaggagggggtgtaggggataggagttgtttgtagagggtagtcgataggttttaagtgggcggtcgataagttttaggtgggcggtcgataggttgtagggaggagttgatagagttcgtgtgaggagttcggagggcgaggaggacgtgggtcgaggtgattcgggtgagggtggattttgttaggttgtgggttcggttgaggaggttagtagtttttggggaggttttagggtgggagggaggaattttgtcgttttttggtggataggagggaagtggggatagtagcggttttagattaggttgttttatttaatattgatttttagatattgaatacgggttatgtatatgttatgttaaagtgttattaggttttagttcggtgagttttagtttttgtggttataagtgtattgtttatttttttttataattagatgtttttaaatgtagatttttgttatttttgtgattttgtttttgtcggtaggaggttgcgttgtgtatgtttttaggggtagtgatgtttggggttaagcgtgtgcggggatttgggagtagaagattgtattagtttgttttcgtattgttataaagaaatatttgagattgggtaatttataaagaaaagaggtttaattcgtttattattttgtagttgtataggaagtatagtggtttttgtttttggggaggttttagaaaatttataattattttggacggtgaaggggaaacgaggaacgttttatatggtagagtatgagtaagagagagagagagagaggggagaggtgttatatatttttaaataattagattatgtgagatttttattatagaaatagtattaaagtagaaaatttattcgtattatttaattattttttataaggttttatttttaatattggggtttataatttgatatgagatttgggcggggatatagattcggattcggaattt

SEQ ID NO: 245 - DNA, 11222 bp, Artificial Sequence
  chemically treated genomic DNA (Homo sapiens)
ggtttggcgttggtttaggagggtagattttgttagggaggtataagttaagttgggggtggggtgggagggtttgttggtaggagggaggtattgtttagattggtttttaaaggttggtttttagaaggaggaggaagagagtagtgaagatcgtggggagttttggttttgaggagttagagtttttttttttgttatatttttgattttttttggtggtgttttaagtttagatttattaaagggaattgttagttgtttaagggttagtaaatttttaggttatttagattggattttttgattataaaaattgtgggttaggtgtatagttgtttgaggggtttaaatttgtgtaggtgggtgttggaattttttttgttatagcgttttttttgtgtgtatgtgattagaggtgagagtggttggagatcgaagatggtagagttcgtttttttttattagattgaggttttcgatttgttttgtttggggagggtgtttagtggaagttttgggatgtttagtttggataagaaaagttttgggtgagtttgtttttttttttgtgaggtagatttagttgggtttttatatttttaaggagtaggcggagttgtcgtaaggaagtgtacgtgatatggaggtattttttggttcgatataaaaaaggatttttaaagttttaggtagtgagtttattatttttaggagtatttaagtagatgttagatgatgatttgtagggaaaattatgtttagtgggaaattggataaaatatcgttgaaggttttttttagttataagatattatggttttataattttagatttttttgtttttagttttttataagtttggaatttagaatttaagttttttcggtgttgaaaagttgaagattttgatattttagaattttaattttgggattttaagattttagaattgggagttttgaggatgattttataagttttagttttggatttaaaggattttgtgatatgaaagggaaaaagaggaggtttgatttggtgggatttagttttgttttattgggtattagattaatgtgttttgtattcgtgcgtgtgtgtgcgtgtgtgtagtatgagcgtgtaaggttgtagaaagttttgtatataaaggtagtttggtttttttattatgtgtttgtagtttttttgttttggttataatgaaggttgttatagggataataatagtttttaaatagagttggtgattttaggtagttatagtaattgtgaggtaacgttgttttgttgtagagatgtgtgagtataaatagatgtcggtgtttttttattagtttaaatggtaaaatttaaaaggtttattaattttaaagttataggtttttatgagtatgttagttaatgggggcgtttgttaagcgggtgatagttttatattaaatattttagtattagtaatgggttgatgagattttaaatgtttaggttatttttagataatttaggaggttagagacgggagaagagttgggattcgggtagtaattagttttgttttgtttcgtatttttaggggtgttttgatattttcgggagggtataggttagagagtatttgaaaatcgtatattgcgttttaatttttaggagttttagatttgttttttggttttttttagcgtattaggtagggggttttaggttagatgtggtatagtttaatgttatttttttttttttgttttttttttttatattttggatttatttttagcgagtgattagtagtaagggttaaattgttgagagtttgagatcggggtagatttttttagagttgtttttttttttgaggttgggtttggtatagattggggttttagtaatgggtttttaaatgaatgaatgaataaaggaataaatagatgattgattgattgaatgaatgaatgagattttttttggtatttttatggtttttttttttttttttgagatggaggttcgttttgttgttaggttggagtatagcgatttcggtttattgtaatttttgtttttcgggtttaagtgatttttttgttttagttttttaagtagttgggattataggttcgtgttattatgtttagttaatttttgtatttttagtagagatagggtttgaatatgttagttaggatagtttcgattttttgattttgtgatttatttattttagttttttaaattgttgggattataggcgtgagttattacgttcggttttttatggtattttagttatttattttgttattgttttttttattgttaaagagatgggtttttggaggtcggttggtttagtatttggggttgatttttggaatggttattagggaaggggcgttagaggtgtagtcggtgtttttgatttttttggtcgttaggagttagtcgatttagtatataggatttattgaatggagatataaggtttttttagggagtggcggtttatggtaattttagaatggttattagttaggttttagagatttatatagagggcgttttgatttaaagttgtattggggaattttaagtttggggattttttgaatttaattttttttttagttatattttttattatttgtttaatttttattaaatatttttgtttatattttgaagttgggatttgattggtagagttagtagatgttgattatttagatggagttttgatattggtttttttagtttggttgtgattggtagtaggtttgcgggagaattgtgtgttttagaatatgattggttatatttgtattttagtaagattggggtagggtagttatttttaaaaagttgtgtaggtggggtagttattattgataaatttagtgtagatttaggatggtttaaatattggtttattttttttgaattttattttttatagttgtaaagcggggtggtgttcgttattttatagaggtgttgtaaagattagatgtaattttgttaagtagttattttgtaaattgtatagttttatgtagatggaaggaagggtttgtgtttattttgattatagtattaaataaattgtattgtatttttattttttttagttatttttttaaaaagattttgagttttttgaatataggaaggtgttttatttgattttgttatttttagtatgtagtagtgtttgatatatagtaggtgttttattattgtgagagggatggatggatgggtggagttatagatggatagaaggatagatggagggatgggtggatgatggatggatagatggatggaggggggatgatgaatggagggataatgagtggatgaatgagggaatgggtggatggatggatggagggatggaggaatagatagatagatggagggatgggtgggtgatggatggatagatggatggagggagggatgatgaatggagggataatgaatggatgaatgaggggatgggtggatggatgaatggagggatgatgggtggatgaatgaattgagggatggatggatgaatatatggatggatggatagatggatagatggaggaattggtggattttggatggatgggtggatggatagatgaatgaatgtttggatagataaagagatgatggatagatgaatagatgaattaagggatgtcggatagatggagggattgatagatgttggatggatgggtggtggatggatagatgagtgaatgtatggatagataaagagatgatggatggatgaattaagggatgatagatggatggatggatgagtaattggatggataagtggataaatggatagatggttgaatatttgaatggattgaaggaggatgtatggatgtaagataaggttaattattttttattttttttttttgtaaaattatttatttatttatttaataaatatttatttagtttaaatttggtataaagtattatgtgaggtttaagagatacgtgggttaataaaatagagtttttgtttttttgaaaattgtaaagaaaggggcgtggttttttgagtttaaattttaattttgttagcgattagttgtatattagtgatgtttttttatttttttttaattaaatagggataatgttagtatttattatattgggaggttttgcggggattaaatgagttattaaatgttaagtgtttgggatagggtttggtatttagtaaagttttttgtgagtgttggttgttattattttaatggagaagatggtatgaaaattaggaaataggatgttttttgggaagtaatgtaataggaatttatataaagaaaggaaaggaggaagtaattagtggtgttttaaaggagtatgttaagaaaaattttttagagggaaatttttgagtagggttatgaaaataggagttttttaagagattgtggatttgtttgggattatttggttataagtataaaattattcggtttttttttgttatttttggttgggtgaggggtttttggtaaaggggtagaaggtgcgtgagaggttgcgaatggttaggattgttttggggttagtcggggtatttggtggttaagtttagaaatatgataggtttttttgggagggttgatcgtagggagcgttgggttttaggttgttggcgtcggtttttgtggtgttttttttgtcggttatgagagtttagatagtgtttaattttttttttttttttttatacgtataattattttattttttgtggtttgagttgttttgtttcgttataatggtatttgttttaaaatagttttttatgtgagggttagagaaaggaaaagattagattttttttggatgagagagagaaagtgaaggagggtaggggagggggatagcgagttattgagcgatttttgttaagtattttagaaggtataaaaacgtttttgggattaggtagttttaaattttagttgttggggttaggatatttagtgagtttatatttgttttttttgttttttttagattgcgttatggggtttagcgacggggaatggtagttggtgttgaacgtttgggggaaggtggaggttgatattttaggttatgggtaggaagtttttattaggtaaaaggaagagattttattgtttttgttatttatattttaagattaagggtgtttagttgtaaggtggaaagtttgtacgtggggtaggttagttggttgtattagttaagggtgttagaacggttatttgttttttttttgtttttaagtgttagggattggatttaggagagggaaaggagttattttaggttgatgttagtagttggaggaagtatgagaattaaatttaggatgtttagagtttattaggaagaattttagaattatagatagttagagttaataagggttttgagagattttgtatagttattttttttataggatgaggataaaaagggattgagaaggggaggatatttttagagttatagtttattaaatgtttttaaagtgttaaggttaagatatgttttttaaggggagatagatttggttttagatttggttttgttattgagttattgggtgatttttgggaaagtatttaatttttcggagttttaatttttttttttgtatagtgaggggatattttaatatttatattttagaggagatgtgagaattaaataaaataatgtatgtaagaggtttggtatggtttttggtatatattgagttttagaaatgttagtagttattattgatgaagtttaggttagggattttttaaagtattgtaattagagaatagaagatagaggtttattagtgattttcgatgttgagtatgtttttagtttgagaggtttgaatgatgtggtttgtaagtatattttgttttttattataagggattttagaatatattaaagaaaataaaattttgaggtttgtaaatagagggtggttgtggtttgtatatagaagtttattttttcgttgttttttattttaaaggtgatatattttttttttggtttttttttttattattttgagttggtttttttagaagtttaataggttaagaattaacgtttttgttaacgggaggaaggaagtgggcgtcggggttgttataagtgaatggattgtttttggtattttaatttgtagattaatttttttttatttgtgagttagagttaattttttttttttatttcgtcgttttttgggttttttttgggttttatttatttttagttttcgtttatttcgggagtatggttggttttggaagtttcgttatttaaaatttgagtcgttggtgattcgtgttagaaatatttgaggaagaagagttgagttttttgttgattgtaatggtatcgtagtgtgtttatgtttttttttttttgtttttgttatttggttgtaataggttttgttggattgtataaagtgttttttcgattaatatatatatataaattgatattaatttttgggttatagatatgttatgtgattttggataagtttttttatttttgggttttatttttttgttggttgagcgaagggattgttttttatggttttcgagatttcgttttacgtttatgttttagaattttttgagtttttgatgtatttttgtttttggcgaggaggtaggatagttaggcgtggaggtaggagattagagtttgtagagtagaggtttttttaaggtgatttgggagttgttagatttaaggtagtgatttgtacgttttgaaagagatttagggtgttgtattattagggaggattacggaggtttgtcgggggtcgggagttagggataagatataatgtttagggttgttggtttttgaaaggttttagaggtttggtgttttgttacgttttaggttgtgggatatgtagagattgtgttagttggttttgtttttttagtatttggggtatagggaggatggtttttttgggggtagggtggaggaggtttatgtttaggattgtaaatgttattcgtgagagttggtattttgattttgttttagatattgattttggattttttaattgattttgaaaggttatgtttttaattttttgattgtaaaagagggtaaattttatgaagtttagtttgtaaaatattgaggtttttattgtacgtatataaatataaaattttagaatatagaagttggaaggttatttggagattttggttttaggagtggggtttcggaagggagggggttgttgagtgggttttatatttttgttttttttttttttatttaaattttttttgttttatttattttggttgttttggggagcggggggaataaaggattttaaggttataaaatgtttgaaaattattagtggtggttattattttttattatagggaggaattgggtttgagagtttttatcggttaatggtagttataggtaggattaaaaatttttgggtgatggtgatgataatgataatgataatgataatggtagagatgatgaggaggagaaagatagtaattatttatttagtatatattgattgttgggttttgtttaagtgttttatttattgaagtttgataataattttatgaggtagatatgattatgattattatatttaatagagaggttaagtaatttacgttaagttatatagtaagtaagaaaggagttggaatttaaatttaggtagtttggatttagaatttttgttttttttttttttttttgagatggagttttgttgggattataggtgtatgttattatgtttggttaatttttgtatttttagtagagattaggtttcgttatgttggttaggttggtttcgaatttttgattttaggtgatttgttcgttttggttttttaaagtgttgggattataagttaatgagttcggtttagaatttttgtttttgattattatgttatattgttttatgattttgttatacgtaagacgggttgttatttacgttttggtttttttattttagtagagttagaggggtgtttatggatttgataatgtgttttatgttttatgtgagtgtttaattgggttttagtttagagaatagtaggaaaatggttttttttttttttgatttggattgaagatttgtttgatgaattaggtttattgatagtagggttgaagttggaaatataggttagcggggttttttgaaatattagagtaaacgtttttcgtttatttttataggttgaggggtttttatttgtttatttttcggattaggtaaatttaggagaatggttttttgtggttgtttggggggtttttagttgtaaggtttgggtttataggaggtaggtagttgtgtggtgtcggaatgattttgcggggagataaattagttcgattttgttttgttgtttaaagtaaatatggggtggggtggggtggtttaggtttataattttagtattttgggaggtaggatcggggaatcgtttgagtttaggagttcgagattagtttgagttatatagtgagattttttttttttataaaaaataaataaaattagttgggcgtggtggtgtgtgtttgtagttttagttacgcgggaggttgaggtaggaggattatttgggtttaggagattgaggttttagtgagttaagattatattattgtattttagtttgggtaatagagtaatatcgtgttttaaaaaaatattaataaagtaaatatgagttttttttttggttgtttggtgttgagtggaaagaaaggtattggcgggtttagatttttttggtttatatatggatgagtaatgatttagagaggttaagtgattttaatattatagagtatattggcgttagaattgggatcggaatttagttttcgtaattgttagttttatgtttttttttttagatattagagggtaggggtaggttttaaaatgtttgagatttttagttgttttgtggtttaaatttttggttttgttttgttttagatagtttgtttttagcgttttgatttttgattatcgtttgtgtatgttaggttttgtatttgttaggcgggagtttaaggattattgtcgttagataataatagttaggagtttagggatttttggatgaaaggtgttagagataagtcgttagtgacgtacgaggatttggataaggttttggagcgaggtggtaatgttgggtacggcggtagattatgtttaatatgggggaagggagtgtatgtggtttaggtttgtgcgtgtttttgtgtgtgtgtgtaggtgagtatggcgtgtgttgggatatatttatgtgtatttttgtgtgagtgtgtaggtttatatgtgagtgtgtatatatatttgtgagagtttgtatgtatgtatacgtgtgaggtgttgatatatgtttatgtaggtattagtttgtttgtaaatatttttgtgtaataataataaagttcgaatagttattaagagtatagatatgaagttagattgtttgggttaaatttttagttagttagtttttcggtgtttttgtttttttttttgtaaaatggcgtttattttattaggattttaaaattagttaatatggttgggcgtttgtaattttagtattttgggaggttgaggtaggcggattataaggttaggagatcgagattattttgtttaatatggagaattttgagaattgtttaaatttaggaggtggaggttgcggtgagtagagattgtattattgtattttagtttgggtaatagagttagattttattttaaaaaagaaaaataaaaaataaaaaaattatgaatttatttttaggttgaggagtttagtattttggttgtgaaatattttttttataaaattttgggatggagattacggggattaggtgtttttttgtgataatttttgggtatggtggtttagggcgtaaattggagtgtggttataatatatattgtgtatttttataaggatgttatagagtttgggtattataaaagaggagttttttaaggaattgaaattattagataggagagagagttttgggtagatagggttgttcgtgttaaatattttagttgtggtataagggaaagggtgggagttatgaaattgttttattttgggtttaggtttgggttttgtcgttagttagttaagtgattttggttatttatttttgtggttttttatgagtaaaaggcggaaatttatttttatttagagggtaggtttgattttttttaattagtatttatttgtttatagtaggaaggattgaggtttaaagttggaggtgggtaggaaggattgaggtttaaagttggaggtgggtaggaaggattaaggtttaaagttggaggtgggtaggaaggatcgaggtttaaagttggaggtggttgtttagagttttagtagaggtttttggggtattttattgagtgtttggtaggagtgggtgtttgttttagggttgggttgagttgtttttattaggatttttcgttatttgtatagtgaggggattgggaggtttagagagttatagtttgggtttaaaataagtaagaggtttttgagtgtgaggattgttttggagtggaatggtttttataggtaggagtgagttttttgtagttagaggtatttaagtagttgaaggataatttttgggtaggaagttgtagagatggtcgtagcgtggattagaattgttgttttggttatttagattttattttagtttggtttttttggatagtatttttgtaatagtgagttggtgattttacgttttagaatttcggtttttatatttgtaaaatgggaattatatgatatttattatgtgttagatattttgttggtatatagtatatattattttatttaattttttaagtagggataagttatttttattttttatatgaggaagttgaggtatagagaggtgaagtgaatggtttaaggttatatagttgggaagatagggagttaaatttgaattttagtttggttgtttttagattttatatcgtattttttatgtcgattttagttttttttgtgtttatagg

SEQ ID NO: 246 - DNA, 11222 bp, Artificial Sequence
  chemically treated genomic DNA (Homo sapiens)
tttgtgggtatagggaaggttggagtcggtatgggaggtgcggtgtgaggtttgggggtagttagattagagtttaagtttagttttttgtttttttagttgtgtgattttgggttatttattttatttttttgtgttttagtttttttatataagggatggggataatttgtttttatttgaaggattaagtgagatagtgtgtgttatgtattaatagggtgtttggtatatagtgagtgttatataatttttattttatagatgtggaaatcgaggttttgaggcgtaaagttattagtttattattgtaggggtgttgtttagagaagttaggttggaatgaggtttgagtgattaaaatagtagttttagtttacgttgcgattatttttgtagttttttgtttagggattgttttttagttgtttaaatatttttagttataggaggtttatttttatttgtgagggttattttattttagagtaatttttatatttagaaattttttgtttgttttgagtttaagttgtgattttttgaattttttagtttttttattgtgtagatgacgaagggttttggtgggagtaatttaatttagttttgagataggtatttatttttgttaggtatttagtgaggtgttttagaggtttttgttgggattttgagtagttatttttagttttagatttcggttttttttgtttatttttaattttagattttggttttttttgtttatttttagttttagattttagttttttttgtttatttttagttttagattttagttttttttgttgtgagtaggtgggtgttggttaaagggagttagatttgttttttgggtaggagtgagttttcgttttttatttatggaagattatagagataagtggttaaggttatttggttagttagcggtagagtttagatttaaatttaaaatggaatagttttataatttttatttttttttttgtgttatagttgaaatgtttggtacgggtaattttgtttgtttagggtttttttttttgtttaatggttttagttttttgaaaagttttttttttatgatatttaggttttgtgatatttttgtaaaagtatatagtatgtattgtggttatattttagtttgcgttttgagttattatgtttagaagttgttataaggaagtatttgattttcgtagtttttattttagggttttatgaggagggtattttataattaggatgttgagttttttaatttgaaaatgagtttatggtttttttgttttttgttttttttttttgagatggaatttggttttgttgtttaggttggagtgtagtggtgtaatttttgtttatcgtaatttttattttttgggtttgagtaatttttagaattttttatgttaggtaggatggtttcgattttttgattttgtgattcgtttgttttagttttttaaagtgttgggattataggcgtttagttatattaattgattttaaaattttgatggggtagacgttattttgtagaggaagaaatagaggtatcgaaagattaattagttggggatttaatttaggtagtttggttttatgtttatatttttgatgattattcggattttgttattgttatatagagatatttataggtaaattgatatttatatggatatgtattaatattttatacgtgtatatgtatgtaggtttttatagatgtgtgtgtatatttatatatgggtttgtatatttatatagaggtatatataaatatattttagtatacgttatatttatttgtatatatatatagagatacgtataagtttgaattatatatattttttttttttatgttgggtatggtttgtcgtcgtgtttaatattgttatttcgttttaggattttatttaaattttcgtgcgttattgacggtttgtttttgatattttttatttaagggtttttgagtttttgattattattatttggcgataatgatttttgaattttcgtttgatagatgtaagatttggtatgtataggcgatggttagaggttaggacgttgaaagtagattgtttgaggtagagtagggttaagaatttgggttataaggtagttgggggttttagatattttggggtttgtttttgttttttgatatttagggaagagaatatgggattgatagttacggaagttgagtttcggttttagttttggcgttaatgtgttttgtgatgttgaagttatttagtttttttggattattgtttatttatatgtaaattaaaagggtttagattcgttaatgtttttttttttatttaatattagatagttagggagagagtttatatttattttattaatatttttttgagatacggtattgttttgttgtttaggttggagtgtagtggtgtgattttggtttattggagttttaattttttgggtttaagtgatttttttattttagtttttcgcgtagttgggattataggtatatattattacgtttagttaattttgtttattttttgtagagaaggggggttttattatgtggtttaggttggtttcgaatttttggatttaagcgatttttcgattttgttttttaaagtgttgggattataggtttgagttattttattttattttatatttattttaaatagtagagtagaatcgggttaatttgttttttcgtaagattatttcggtattatatagttgtttgttttttgtgggtttaggttttgtagttaggagttttttaggtagttatagaaggttatttttttggatttgtttgattcggaaaatgaatagatgaaagttttttagtttgtggaaatggacggagggcgtttgttttagtattttagaaagtttcgttggtttgtgtttttagttttaattttgttgttagtgggtttggtttattagatagatttttagtttaagttagagagaagggaggttatttttttgttgttttttgaattgaggtttaattggatatttatatggaatatggagtatattgttagatttatgaatatttttttggttttattagaataaaagaattagagcgtgggtggtagttcgttttgcgtgtggtaaggttatggggtagtatagtatagtggttaagagtaaggattttgggtcgggtttattggtttgtaattttagtattttgggaggttaaggcgggtagattatttgaggttaggagttcgagattagtttggttaatatggcgaaatttagtttttattaaaaatataaaaattagttaggtatggtggtatgtatttgtaattttagtaagattttattttaaaaaaaaaaaaaaggagtaaggattttggatttaagttgtttgaatttgaattttagttttttttttatttgttgtgtgatttggcgtaagttatttaatttttttgttaaatgtggtgattataattatatttattttataagattgttgttaggttttagtgagtgaaatatttaaatagagtttagtaattagtatgtgttgaataaatggttgttgttttttttttttttattatttttattattattattattattattattattattattattatttaggaatttttggttttgtttgtggttgttattaatcggtggagatttttaggtttagtttttttttgtaatgagaagtagtgattattattggtgatttttaaatattttatgattttgaaattttttgtttttttcgttttttaaaatagttaaagtaaataaaataaaaaaggtttgagtaaagaaaggaaaaataggggtgtggagtttatttagtagttttttttttttcgaagttttatttttggagttagaatttttaagtgattttttagtttttgtgttttagaattttatgtttgtgtacgtgtagtgaaggttttagtgttttatagattgggttttatggaatttgtttttttttataattagaagattggagatataattttttaaggttagttagaaaatttagagttagtatttagaataaagttaagatgttaatttttacgggtggtatttgtagttttgggtatgagttttttttattttgtttttagggaggttattttttttgtattttaaatattgagagggtagaattagttggtatagtttttgtatgttttataatttaagacgtgatagggtattaggtttttgggattttttagggattagtaattttaggtattatgttttatttttggttttcggttttcggtaaattttcgtgattttttttgatgatgtaatattttgagttttttttaagacgtataagttattgttttaggtttggtagtttttaaattattttggaaagatttttgttttgtaaattttggttttttatttttacgtttgattgttttgttttttcgttaaaggtaaaagtgtattaaggatttagagaattttagggtatgagcgtgggacgggatttcggagattatggaagataattttttcgtttaattagtagagaaataaggtttagaggtggagagatttgtttaaggttatatggtatatttgtggtttaggagttgatgttaatttgtgtgtgtgtgttggtcgggggagtattttgtgtaatttaatagggtttgttgtagttagatgatagggataggagaagaaagatataaatatattacgatgttattatagttaatagaaaatttaattttttttttttaagtgtttttagtacggattattaacggtttaaattttagataacggagtttttaggattagttatgttttcgaggtagacggaagttggaaatgggtaaagtttaagggagatttaaaggacgacggagtggaagaggaaaattggttttggtttataaataaggagaaattaatttgtaaattaaagtgttaaagataatttatttatttgtggtaatttcggcgtttattttttttttttcgttggtagaaacgttgatttttaatttattagatttttgagggaattagtttagaatggtgagggaaggggttaagagaagagtgtattatttttgggatagaaggtaacgaggagatgagtttttatgtataaattatagttattttttatttataaattttagaattttgttttttttggtgtattttggaattttttgtggtagaaggtaggatatatttgtagattatattatttagattttttaaattagagatatatttaatatcgaaggttattaatgagtttttattttttgttttttaattgtaatgttttgaaaggtttttagtttgggttttattagtaatagttattaatatttttaggatttagtatatgttaggaattatgttaggttttttgtatgtattattttatttaatttttatattttttttaggatatagatattaggatatttttttattgtataggagaggaaattgaggtttcgagaggttgagtatttttttaaaggttatttagtggtttagtggtagagttaagtttagaattagatttgtttttttttgaagagtatgttttaattttgatattttaagagtatttaatgagttgtgattttggaaatgtttttttttttttagtttttttttgtttttattttgtaagagaggtggttgtataaaattttttaggatttttgttaattttgattgtttataattttaaaattttttttggtggattttgagtattttaggtttgatttttatgttttttttagttgttgatattagtttgaaatggttttttttttttttttgagtttaatttttgatatttaaaagtaaagaaaaagtaagtgatcgttttaatatttttaattaatgtagttaattgatttattttacgtgtaaattttttattttgtagttgaatatttttgattttagggtgtgggtggtaggggtaatggaattttttttttttatttgatgaggattttttgtttatggtttgggatgttagtttttatttttttttagacgtttagtattaattgttatttttcgtcgttgagttttatggcgtagtttgaagaagataaaaagagtaagtatgggtttattgggtgttttggttttaatagttggggtttgaggttgtttggttttaagggcgtttttatattttttgggatgtttgataaagatcgtttaatggttcgttgttttttttttttgtttttttttatttttttttttttatttagggagggtttaatttttttttttttttagtttttatatgggaagttattttagggtaggtgttattgtggcgaggtaggatagtttaggttatagggggtggggtggttgtgcgtgtggaaagaaggggaggaggttgggtattgtttggatttttatagtcgatagaaagggtattatagaagtcgacgttagtagtttgaaatttaacgttttttgcggttagtttttttaagaggatttgttatgtttttaagtttggttattaggtgtttcggttggttttaggatagttttggttattcgtaattttttacgtattttttgtttttttgttagagattttttatttagttagaagtgatagaaaggaatcggatggttttgtgtttatagttaggtggttttaggtaagtttataattttttagagaatttttgtttttatgattttgtttaaaggtttttttttgaaaagttttttttgatatatttttttgagatattattaattgttttttttttttttttttttgtgtaagtttttgttgtattgttttttaaagggtattttattttttggtttttatgttattttttttattaggataatagtagttagtatttataagagattttgttgggtgttaggttttgttttaaatatttggtatttggtaatttatttaattttcgtaagattttttaatgtgataggtattgatattatttttatttaattgagagaaagtagggaaatattattgatgtataattagtcgttggtagagttgggatttgaatttaggaagttacgtttttttttttgtagtttttaggagggtaggagttttgttttattaatttacgtattttttgggttttatatggtgttttgtgttaagtttgaattgaataaatgtttattgagtaaatgggtggatggttttgtaaagaaagagagtggaggatgattagttttattttatatttatgtatttttttttaatttatttaggtatttaattatttatttatttatttatttgtttatttagttatttatttatttatttatttgttattttttaatttatttatttattatttttttgtttatttatgtatttatttatttatttatttattatttatttatttaatatttattaatttttttatttattcgatattttttaatttatttatttatttatttattatttttttgtttatttaggtatttatttatttatttatttatttatttatttaaaatttattagtttttttatttatttatttatttatttatttatgtgtttatttatttattttttaatttatttatttatttattatttttttatttatttatttatttatttttttatttatttatttattatttttttatttattatttttttttttatttatttatttatttattatttatttatttttttatttatttatttgtttttttatttttttatttatttatttatttatttttttatttatttatttattatttttttatttattattttttttttatttatttatttatttattatttatttatttttttatttatttttttatttatttgtaattttatttatttatttattttttttatagtgatagagtatttattgtgtgttagatattgttatatgttgaggataataaaattaaataaaatatttttttgtgtttaaggaatttagagtttttttagggagataattaagaggaatgaaaatatagtatagtttgtttagtgttatgattaaggtaggtataggtttttttttttatttgtataagattatatagtttataaagtggttgtttggtaagattatatttaatttttataatatttttgtgaggtagcgagtattatttcgttttatagttgtgggagatgagatttagaaaggataagttagtgtttgggttattttgggtttgtattggatttgttagtaatgattgttttatttatatagttttttgaagataattgttttgttttaattttgttgaggtgtaggtgtagttagttatgttttgggatatatagttttttcgtaaatttgttgttagttatagttaagttgagaaagttaatgttagggttttatttgaatagttagtatttattagttttgttagttagattttagttttagaatgtgaatagagatgtttggtaagaattggataaataataggaaatgtagttagaaaaagagttaaatttaaagaatttttaaatttggagttttttagtgtaattttgggttagaacgttttttgtgtgggtttttaaagtttggttggtgattattttaggattgttatgagtcgttattttttggaggagttttgtgtttttatttagtgagttttgtgtattgagtcggttgatttttagcgattaaaagggttagaggtatcggttgtatttttggcgttttttttttagtgattattttagaagttaattttaaatgttaggttagtcgatttttaaaggtttatttttttagtagtggaagaagtagtaataaaataagtagttaaaatgttatggggggtcgggcgtggtggtttacgtttgtaattttagtaatttgggaggttgaggtgggtggattataaggttaagagatcgagattattttggttaatatgtttaagttttgtttttattaaaaatataaaaattagttgggtatggtggtacgaatttgtagttttagttatttgggaggttgaggtaggagaattatttgaattcgggaggtagaggttgtagtgagtcgagatcgttgtattttagtttggtaatagagcgagtttttattttaaaaagaaaaaaagaagttatggggatgttaaaggggattttatttatttatttagttagttagttatttgtttgtttttttgtttatttatttatttgaaagtttattattgaggttttagtttgtgttaggtttagttttagaaggaaagataattttgagagggtttgtttcggttttagatttttagtagtttgatttttattgttggttattcgttggaggtgagtttagggtgtgagagaggagggtagaaagaaggagatggtattgagttgtgttatatttgatttggggttttttgtttggtgcgttggggaaggttaagaggtagatttgagatttttggagattgagacgtaatgtgcggtttttaaatgttttttggtttgtgttttttcgagagtgttagaatatttttgagggtgcggggtagggtagggttgattattattcgaattttagtttttttttcgtttttggttttttgagttgtttggggatggtttgagtatttaaaattttattaatttattattgatgttgaaatgtttaatatgaagttattattcgtttggtaagcgtttttattaattggtatgtttatggaaatttgtagttttgaagttgatggattttttaagttttattatttaagttaatgggaaggtatcgatatttgtttgtatttatatatttttataatagagtagcgttattttatagttgttatggttatttggagttattagttttgtttgggggttattattatttttgtgatagtttttattatggttagggtagagaagttgtagatatatgataggaaagttaggttgtttttgtgtgtaaaattttttatagttttatacgtttatgttatatatacgtatatatacgtacgaatgtagggtatattagtttgatatttagtggggtaaaattggattttattaagttagatttttttttttttttttttatattataggattttttgaatttaaaattgagatttgtagaattatttttaaggtttttaattttggaattttgagattttagaattaaaattttagagtgttaaagtttttaattttttagtatcggagaaatttgggttttagattttagatttatagagagttagaagtagagaaatttagaattatagggttatagtattttgtgattaaaagaggtttttaacggtattttgtttaattttttattaaatatagttttttttatagattattatttggtatttgtttgaatatttttgggagtggtgagtttattatttaaagttttaaaaatttttttttatgtcgaattaaaagatgtttttatgttacgtgtatttttttgcggtagtttcgtttgttttttggggatatagaggtttagttgagtttgttttataagagaaggagtaggtttatttaagattttttttgtttagattgaatattttaggatttttattgagtattttttttaggtaaggtaagtcgggggttttagtttggtggagaaagacgggttttgttattttcggtttttagttatttttatttttggttatatgtatataaagagaacgttatagtaaaggggattttagtatttatttgtataggtttgagttttttaggtagttgtgtatttggtttatagtttttatggttagaaaatttaatttaggtgatttaggaatttgttagtttttggatagttgataattttttttggtaaatttgggtttaagatattattaagggagattaaagatgtggtaagaaggagaattttggttttttaaagttaggattttttacgatttttattatttttttttttttttttttgggaattagtttttggaggttagtttgggtagtgttttttttttgttagtaggtttttttattttatttttagtttagtttgtgtttttttggtagagtttatttttttggattagcgttaggtt

SEQ ID NO: 247 - DNA, 5952 bp, Artificial Sequence
  chemically treated genomic DNA (Homo sapiens)
atatttttgatttttatatgagtatatgttcgagtagtttggattataggtgtgtagtattatatttagttaatttttaaatttttgtgtagcgatgaagttttattttattgtttaggttggttttaaatttttgggttcgagtaatttttttatataggttttttaaagttttgggattataggtatgagttatagtattcgagtaagatgattttttaagataggtgaagatgttagtgtttagaattttatttttaggggtacgtaggtatgaaaggttatatttaagtgagtgttatgttagtttttttagaaatttagttgtttttttttaaatttagtttaataaaaggaggtttggagaattaatgtatataagttagaattatagaatgtatagtatgattattaggatggataatatgtggtttgaataaattttttatttattatatttagtttttttaggttaatggaatttagattaagtatatttttgaagttagtattgtgtgacgaataggggtttggtggaagtgatgttaatagggttttaggttagttttagagttttttttttttttttttttcgttttttgttttttttttgtttgttttttgttttttttttttagatagttttttttttgttgtttaggttggagtgtaatggtgtgatttcggtttattgtaattttcgttttttaggtttaagtaatttttttgttttagtttttcgagtagttgggattataggcgttcgttattatagttggttaatttttgtatttttagtagagataggggttttaggttaggttggttttgaatttttgattttaggtgattcgtttatttgggttttttaaagtgttgggattataggtattagttattgtatttggtttaagaaatatttttaagtatgtttgattttggtaaatgtttttgattttttttgtaggaaaaaattttagagatcgaatttttgtgttaaagaataagtaaaattttaaggtttttgatatatatttttaagtttttattagaaaaattatattaatgtatatttttatttgtaatgtatttaagtgtttatttttttgaattttttttaatatattaggtgttaatatgatttttattaatttggtaggttaaaattttgtttttattgaatttatatttttttgtttattaatgtggttaataaattttacgtttatgaagattaggattggatagtggaggttagatatttttggttttttgtttagatgaataaattttttattttttttaatttatttaagttgagttttttgttattgaaatttaaattatattaattaatataattttttgaggtatattgaagttttaaaatttgtatggttatttattatgttttatgggttttttttttatgtttggaagtttataggaagattttataaatatttattaaaatatttttttattttttattgggttaagatttgaatttgaattttttatttagaatttagtgaataattattaggaaaagtttttttttttttttttgagatggaggtttgttttgttatttaggttggagtatagtggcgtaattttggtttattgtaatttttgtttttcgggtttaagtaatttttttgcgttagtttttttagtatttggaattataggtgtgtattattacgtttagttaatttttgtatttttagtagagacggggttttattatgttggtttggttggtttcgaatttttgattttagatgatttatttattttagttttttaaagttttgggattataggtatgagttattgcgtttatttagaaaagtttatagtttttatttttttttaatagtttaattaattatttgattaaaatttattttatttttttttttattgatttaatagtatttttattagatgttagagtagttatttaaaatgtaaattggattatattaaagatttgttgttgattatatttttttgtatttttagagagtttataaagttttgtaagagtttattttagtttttttgtaattttattttgtattatttttgttttagatatattagtttgagttttatattaaatttgtttgaatatattttaagtatgttgatttttataattatgttatttttttagtttagaatgtttttttttaattttttaagtagttgttttttttgataagatgttatttttttagagaggttttttttgattatagttataggtatgtttatgtttttattttagtttaatataaaatttacgtaattgtatatttttttattatttgatatttttaggaggatattatttttgtaatagagtagaaataaatagattgatgtatatggtggattttttatggatagagtttgttatttaaaatgtttttaaatttattatatgtaatttggtattaaattaaaatgttattatgtaagcgaatgtttttaaagtttaaaagtttttttaaaataaaatagattcgggcgcggtggtttatgtttgtaattttagtattttgggaggttaaggtaggtagattatatgaggttaggagtttaagattaatttggttaatatggtaaaatttcgtttttattaaaaatataaaaattagttaggtgtgatggcgtatgtttgtaattttagttatttaggaggttgaggtatgagaattgtttgaatttaggaggcggagattgcggttagttaagattatattattgtattttagtttgggtgatagagtgagattttgttttagaaaaaaaaaaaagaaaaagaaaaagaaaaaaaaaaagaaattttaagtgataaagtattgtgtaatagtttgaggttgggtatagtggtttatgtttgtaattttatattttgggagatcgattgggaagattgtttgagtttaggagttggagattagttagagcgatatagtgggattttttttttataaaaatatttaaaaattagttaggtatagtggtgtatttttgtagttttagttatttgggaggtggtaagaggatttttcgagtttagaagttggaggtggtagtgagtagttattttgttattgtattttagtttgggtgttaaagggagatttttttttttagaaaataataaaaaaaaaagtttgatagtttttttgtttgtgttatataaaataatggtatatattataattgaaggtattttataatagaaatgtttttttttgtttttttttaaggttgatttagtgttttaagaggttgatatagaagggtaaagttaagtttttataaaatttagggaagagattgtgaaatttattttagaattttgtatggagttatagttgaattaggaaaaaaaaaaaaaaaaaaaaaaggaaagaaaggtattttagagataaagaatagattaaggagaggagatatttgaagttataatgattgagaatatgttagatttgaaatgaatttttagtttttttaataagataaataaaattaattttatatttagatatatggtagaaaaattaaagaattttgttgattaaggtattaaaagtaattaaagagaagtggtgtgaagaaagtaagagagaaataataaattttgtttattttgtaataattgaaaatttttggttgggcgtggtggtttacgtttgtaattttagtattttgagaggtcgaggtaggtggattattttaggttaggtgtttaagattagtttggttaatatggtgaaatttcgtttttattaaaaaaaaataataataataatataaaaattagtcgggggtggtggtaggtatttgtaattttagatattcgggaggttgaggtaggagatttatttgaatttgggaggcggaggttgtaatgagttgagatcgcgttattgtattttagtttggatgatagagtaggattttattttaaaaagaaaggaaaagaaaagaaaaaatattaaatgtgtacgttttttgatttagttgtattattttaaggagttgatattattaaaattgtttaagtgtttaaaggtgtttgtagttaaataataggagattgataaattatgttatatatatgtgatgttatgttttaaagaggtattgatatgataaaagatgtacgtggtataaaattaaatgtattttattaagtatttttttaagtgtttacggaatgagtgtatttttgaaaaaaaaaaagtgtattcgaatttttaaaaaagttttaaaagttttatataatgaacgattgagtgattataagagttggcgggggaatgttaagaggatgatagggagttaagtttaatagaataatttatttttttattttgtgatatttacgagcgtattaattttgtaattgaaaaataaagtgtatatttgtagtagttgtattttttttaggttgtaaggaggttttttttttcggtaggtttgatttgtattttatttttattttcgtggttggaaattttttatttacgtagtgggaggttgaggagttattataaagttggggtttgacgagtcgggatcgggattcgatttttatatatgttcggatttgttttgcggtcgggtttaggagttaaagaggcggggagatttgcgcgacgttgtttcgttttgcgttcgttttttttaatgtatgttttagggggcgggtttcgcggggagtatggatacgattggttttaaagtttttttcgtaaggtcgtgggttggatagcgtggtgacgtcgtaacgcggcgtagggtgagagcgcgcgtttgcggacgcggcggtattaaacggttgtaggcgtagtagagtggtcgttgtttttttaggttttagtcggtcgtcgcgacgttcgttcgttcgttttgaggtttttgaagtcgaaattagttagatttttttttttttcgtttgtttgtagcggcgttgttgttatttcgttattatgttcgaggcgcgtttggtttagggttttatttttaagaaaggtgttggaggtatttaaggattttattaacgaggtttgttgggatattagttttagcggtgtaaatttgtagagtatggattcgttttacgtttttttggtgtagtttattttgcggtttgagggtttcgatatttatcgttgcgatcgtaatttggttatgggcgtgaattttattaggtgagtttcgcggtttcgggaagtcggtttcggttcgtttgtattttcggtgtttggcgggagcgttttcgagtttagtttttattggttggcgtgggttattcgcgtttttttattggtttgttacgtagtggggtggggtttagttgagcgcgcggttcggaaaagttcgcgttggttgttgcgcgaatttgttttttcgcgttaaagttataaagcgggtggtggcgggaaaattaagggttttttcgtagtgttaggaatattgttttagggttttttgtttattaaattttgttggttttgaatggacgttttagttgtggtttttttgtttttgagacggtttcggtgtgttgttcgggttggtttttaatttttgggtttaagcgattttttcggtttagtcgcggttgattttaaatgttttataatgtttttgcgagaaatgtggtagtttgttattttatttagtggtaggagattgtttttatttagaagggatattgttggtggtattttagtataaatattgttagatgcgttttaaaacgtttgtattaataatggtattttttagtagttcgtttattttttattagttttgagacggtttgatgggtgagagtggtaattttttttaatcgcgttcgaaatatagttttttagtagacggcgttgattttaaagtatgtgttttttgttttttagt

SEQ ID NO: 248 - DNA, 5952 bp, Artificial Sequence
  chemically treated genomic DNA (Homo sapiens)
attagaagataggagatatatgttttaaaattaacgtcgtttgttgaagggttgtatttcgaacgcggttagaaggggttattatttttatttattaggtcgttttagaattggtggagggtaagcggattgttggaggatgttattattaatgtagacgttttgggacgtatttggtagtatttatattaaaatattattagtagtgttttttttggatagaaataattttttgttattaagtaggatgataggttgttatatttttcgtaagggtattataaagtatttaaagttaatcgcgattgagtcgggaggatcgtttgagtttagaagttggagattagttcgggtaatatatcgagatcgttttagaaataagaaagttatagttaaagcgtttatttaaggttaataggatttagtgagtaaagagttttggaatagtgtttttggtattgcggaaaaatttttgattttttcgttattattcgttttgtgattttggcgcgaaaaagtaggttcgcgtagtagttagcgcgggttttttcgaatcgcgcgtttagttgggttttattttattgcgtggtaggttaatgagaaggcgcggatggtttacgttagttaatgagggttaggttcgaaagcgttttcgttaagtatcggaggtgtaggcgggtcggggtcggtttttcggggtcgcgaggtttatttggtgaggtttacgtttatggttaggttgcggtcgtagcggtaggtgtcgaagtttttagatcgtagggtgagttgtattaaagagacgtgggacgagtttatgttttgtaggtttatatcgttggagttaatattttagtaggtttcgttgatgaggtttttgagtgtttttaatattttttttgaggatggagttttggattaggcgcgtttcgaatatggtggcggagtggtaataacgtcgttataggtaggcgggaaggaggaaagtttagttggtttcggttttaggagttttagagcgagcgggcgaacgtcgcgacgatcggttgagatttagaaagataacgattattttgttacgtttgtaatcgtttaatgtcgtcgcgttcgtaagcgcgcgtttttattttgcgtcgcgttgcgacgttattacgttgtttagtttacggttttgcggggaagattttagggttaatcgtgtttatgtttttcgcgaggttcgttttttagagtatatattggaggaagcgggcgtagggcggggtagcgtcgcgtaggttttttcgtttttttgatttttgaattcggtcgtagaataagttcgggtatatgtggagatcgggtttcggtttcggttcgttaagttttagttttatggtggttttttagttttttattacgtgggtagaaagtttttagttacgaaagtgaaagtgaaatgtaaattaagtttatcgggaggaaaagtttttttgtagtttgaagagagtatagttgttgtaaatatgtattttattttttaattatagaattgatgcgttcgtaggtgttataagataaagaggtgaattgttttgttaaatttagttttttattatttttttaatattttttcgttagtttttataattatttaatcgtttattgtataaagtttttaaagtttttttaaaagttcgaatatatttttttttttttaaaaatgtatttatttcgtaaatatttggaaaagtatttaataaagtatatttaattttatgttacgtatattttttattatattagtatttttttaaaatatagtattatatgtatataatataatttattaattttttgttgtttaattataaatatttttgagtatttaggtaattttggtgatattaattttttgaagtaatatagttgagttaaagagcgtatatatttaatatttttttttttttttttttttttttttgagatggagttttgttttgttatttaggttggagtatagtggcgcgattttagtttattgtaattttcgttttttaggtttaagtgagttttttgttttagtttttcgagtatttgggattataggtgtttattattattttcggttaatttttgtattattattattatttttttttagtagagacggggttttattatgttggttaggttggttttgaatatttgatttgaggtgatttatttgtttcggttttttaaagtgttgggattataggcgtgagttattacgtttagttagaaatttttaattgttataggatggataggatttgttgttttttttttgttttttttatattatttttttttagttatttttaatattttggttagtagaattttttagtttttttattatgtatttaggtatggagttagttttatttgttttgttgagggaattgaagatttattttaagtttgatatatttttaattattatggttttaaatattttttttttttagtttattttttatttttggaatgttttttttttttttttttttttttttttttttttttagtttagttgtgattttatataaggttttaagatgagttttatagttttttttttggattttgtggagatttaattttatttttttgtattagttttttaaagtattgggttagttttaaaagggaataggaaagggtatttttattataagatgtttttaattgtaatatgtattattattttatgtagtataagtaagaaaattgttaaatttttttttttattattttttagagaggggagtttttttttgatatttaggttggagtgtagtggtaagatgattatttattgttatttttaatttttaggttcgagagatttttttgttattttttaaatagttgggattataggggtgtattattgtatttggttaatttttaaatgtttttgtagagagaaggttttattatgtcgttttggttggtttttaatttttgggtttaagtaatttttttaatcggttttttaaagtgtgagattataggtatgagttattgtgtttagttttaaattgttatataatgttttattatttagaattttttttttttttttttttttttttttttttttttttttttgagatagagttttattttattatttaggttggagtgtagtggtgtgattttggttaatcgtaattttcgttttttgggtttaagtaatttttatgttttagttttttgaatagttaggattataggtatgcgttattatatttggttaatttttgtatttttagtagagacggggttttgttatgttggttaggttggttttgaatttttgattttatgtgatttgtttgttttggttttttaaagtgttgggattataggtatgagttatcgcgttcgggtttattttgttttaaaagaatttttagattttaaaaatattcgtttatataataatattttggtttaatgttaaattatatgtaatagatttgaagatattttaaatgataaattttatttatgggggatttattatgtatattaatttgtttatttttgttttattatagaagtgatgtttttttaaaagtgttaaatgataaagaggtgtatagttacgtaaattttatgttaaattgaaatgaggatataaatatgtttatgattgtggttagagaaggtttttttgaggaggtagtattttattagagaagatagttgtttggagagttggaaaaaagtattttaggttgagagaatagtatgattataaaggttagtatatttggaatatatttagataagtttgatgtagaatttagattgatgtgtttgaagtaagagtggtgtaaggtgaggttgtagagaggttggggtgagtttttgtaggattttgtaggttttttaaaagtgtaagggaatgtggttaatagtagatttttgatgtgatttaatttatattttaagtggttattttaatatttagtaaaggtattattggattagtgggagaaagaatgaagtaaattttgattagataattggttaaattattagaaaagaataaaagttgtagatttttttggatgggcgtagtggtttatgtttgtaattttagaattttgggaggttgaggtaggtggattatttgaggttaggagttcgagattagttaggttaatatggtgaaatttcgtttttattaaaaatataaaaattagttgggcgtggtggtgtatatttgtaattttagatattagggaggttgacgtaggagaattgtttgaattcgggaggtagaggttgtagtgaattaagattgcgttattgtattttagtttgggtgatagagtaaatttttattttaaaaaaaaaaaaaaagattttttttaataattatttattaaattttagataaagaatttaaatttaaattttgatttaataagaaatggaaaaatattttggtaaatatttatgagatttttttatgggtttttaaatataagaaaaaaatttataaaatataatgaataattatataagttttaagattttagtatgttttaaaggattatattggttagtatagtttaggttttagtgatagagaatttaatttgaatggattaagagaaatagaaaatttatttatttaaataaaaagttagaggtatttggtttttattgtttagttttagtttttataaacgtgaagtttgttagttatattaataagtaaagaaatgtaaatttaatggagatagaattttaatttattaaattaataaaaattatgttaatatttggtgtgttaggaaggatttaaggaagtaggtatttaaatatattgtaagtgggagtatatattggtataatttttttggtggaaatttagaaatgtgtattaaaagttttagaattttatttattttttgatatagaaattcgatttttagggtttttttttatagaagaaattaggggtatttattaagattaagtatgtttaagaatgttttttgagttaggtgtagtggttgatgtttgtaattttagtattttgggaggtttaggtgggcggattatttgaggttaagaatttaaaattagtttgatttaaaatttttgtttttattaaaaatataaaaattagttagttgtggtggcgggcgtttgtagttttagttattcgggaggttgagataggagaattgtttgaatttgggaggcggaggttgtagtgagtcgagattatattattgtattttagtttgagtaataagagggaaattgtttaaaaaaaaaaaataaaaaataaataaaaagaaaataaaaaacgaaaagagagagagagaagggttttaaagttggtttaaagttttattagtattatttttattagatttttgttcgttatatagtattgattttaggaatatatttgatttgagttttattaatttgagagggttgagtgtaatggatgagaagtttgtttagattatatgttatttattttagtaattatattgtgtattttataattttgatttatgtgtattgattttttaagtttttttttattaggttggatttgaaaaggagtagttgagtttttagaaggattgatatgatatttatttagatatgattttttatatttacgtgtttttgaaggtgaagttttagatattaatatttttatttgttttagaagattattttgttcgagtgttgtggtttatgtttgtaattttagaattttaggaggtttatgtgggaggattgttcgagtttaggagtttaagattagtttaagtaataaagtgagattttatcgttatataaaaatttaaaagttagttgggtgtggtgttgtatatttgtagtttaagttattcgggtatatatttatatagaaattaggaatat

SEQ ID NO: 249 - DNA, 6664 bp, Artificial Sequence
  chemically treated genomic DNA (Homo sapiens)
tattataagggtattaattttattaatgagggaaaagttttcgaggtttaataattatttttcgaaggttttattttttaatattattattttggggtttaagttttaatatatgtatttaggaggggtatatatttttaaattatagtaattcgtaagtgatatatattttaggttttatggaatttatatttatttttggttatatttagttacgtggatgttttatagtattttattattaatatgtttaaagtgatgttttatgttttatagttgttttttagtatttttttagaatagtaggatttttagtttgttgtaaagttatatatttaagttatttttgatgatttttttttttttttttaatttagttttagtttttaaaaatattttattgttattttttttttttgaaattgatatttttttaagtttagtatttgttgggattgttgtagagttttttattgtttgttggttttgatgttgtattattagttttttttatgattttttttttttaatttttatttatgattatgttattgttttgtttatatttttttgtttaagtttaacgtttaatttaaaatttttagtatgattttgaatattatttttaaggtatagatattatttaattatttagtttaatgtttatgatttttgttgagtatttagattttgtttatgtttagcgtattgaattaattttagtttataaatttgtattgtttttttttgttaatggattaagttttttatttttatttgtttttttggtaaattttttttattttttaagatttagtttagttaattttgttatgaagttttgtttgatgttttttttattatgttttgtatatagtagtttttattatattgtattgtaaatatttgtattttatttaggtggaagatttatagttatttatttgttatttttgatttttattagttttaaggttgatatatgaattttttttttttatattatgtttagtttttaaaattttaatgagagattaaggtgggttgatatgtatgtatttaaagtataattattaataggtttaaagtgatttttttttttttttgtggggcgagaatgaagatagggggtatggaggttgtatatgataaatttttattatttgtattttatattttggattattttttaaaatttatagaaaaattatattatttttataattagaaaaatatttaattttgttatagtaacgatagtttagtatttttatttgtggtgaaaagatttgaatttatatattttgtattttttgttatttttttttttgaattaatatgaaaaaggataaattttttttttttgtatatatttttcggtaatttttaaattttttttttttttttatatatttgtttgtatagagatagggttttattatgttgttaagttggttttaaatttttggttttaagggattttttattttggttttttaaagtgttgggattataggtgtgagttattgtgtttggttaatttttattatttttatttagtagtaatggaggttttggtaagattgatttatttatttatttatttattcgtttatttttgggttagggtagtatatttacgtggtttaatatttaaaagatataaaatttttttttttatttttgtattaggttatttttgtattttatagagggtatatttttattagttttttttatttttttttcgaagtgtatttttttttttttttttttttttttagaaggagtttcgttttattattaggttggagtgtagtggcgttatttcggtttattgtaatattcgtttttagggtttaagcgatttttttgatttagtttttcgagtagttgggattataggtatgtgttattacgtttagttaatttttgtatttttagtagagatgggtttttattacgttggttaggatggtttcgattttttgataacgtgatttattcgttttggttttttagagtgttgagattataggcgtgagatatcgcgttcggttcggaggtgtatttttaagtaaatgtttttatattttttttatttaaaaaaaatatttgttttgatttgggttgttataataaaatgttatagattacgtgttttaaataataaaattttatttttatttagttttggaggtttggtgtgtaagtttagagggcgggtaatattaggttttggtaagggttgatttttttattgataggtgtttttttattttaattttatatgagagtaattaagttttttagcgtttttttttataagagtattaattttattacgagggttttatttttatgtttttatttaaatttaattattttttaaagttttatttttaaatattattttagtggggtgaggtttttaacgtatgaattagcggggtggggggataataaatatttagattatagaaatacgtaaatataagaaataaaattaaaaagatttatgtgtaatattaattgatttttttttttttttttaaaatggagtttattaaaatataaatatgaagttttttagagtatatatttttttttgtttttttttgtagtttttttttttttaatattatttttagggtagtttttttaaaatatggttttaaggttgtgtgtattttttttgtttagattttttggaatagtgtttagcgtttattaggattttgattgtaaatttttttttttgattttaatattataggatgtagtattttttatattttattatggggggtattttgaattatttgggttgattttttggtttttgtgttttatttatataattttttttgtatggaaggtttattttagaattttttttttagtttttgtttaaatgttatttttgttagtattagtagtttttttttttgggtttttatattgttttgtaatataagttataaggtaagtattagaagagaatttttaattattattttgtttttttatttttaatatttttagcggtaattgtattttatttatttttgtgtttatgaagtatagtgttgtattttggagatattatatagaagttggtttaaagggtaataaattgtatttgttaagatgatagtatggatttataataatttttgaaattttataaagaaagatgattgagttaaattgatatatttagtattatagttgtggaagtttgtggttttttttatgttaaaggtaaaatggatataatgaattagttgttatttttagatgatatagaagttgaattttttttaagttttttaaagagaaagatatattaaaatttattaaaattagtattataaattgtatagaatagtttggttttttagagtatttttttggggtagtgagtttttatttaaaaaatgaagtttggattttaaatataagttttaaaagtgattaggttttagtaggagtttttaaatttttatttatattatgatttttaaatgttttgtttttgttgtttaggaataaaaattgttaaggttgagttagatgtaatgtataatattagatgatagatgtagtttattgtgttaaaaggtgttaaatatttaagtgtatgtgatatattttatattataagggtaaggaagttttattttatattttgatttgggttttttaatatatatttgtagtggatgtggtaattagtttttgttttatgttttattaggattaatgtaattagaaatttttaaaatggatttttattatgtttagttttgttttattgttttatttgtttattttaaaaagattttagaatggtgtttaggttgggttggtggtttacgtttgtaattttagtattttgggaggttaaggtaggaggattgttggagtttaggagttggagattagttagggtaatataaggagatattgttttcgtaaataaatagaaaaaaaaaaagtaagaaagaaagagagaaagaaggaaagaataagaaaaaggaaaaaaaaattaattgtagtaagtgtagaaattttttttaaggatatgatggatggtaatgaagatagagtttttgatattggattatttaaagtataatttaagtttttttttttttttttatagaattgtgaatttttgtgttttaattatatttaagttaggcgtggtggcgagtgtttgtagtcgtagttgcgttggaggttgaggtcgattgtttgagtttaggatttggaggttagtatgcgtaatataatgagatttagtttttaaatgtatgtttttttttatatatttaaaattttgatgtgaaaatattttaaaatttaatatattttaaatgtttttaattgtataataaataaaatgtaaataataaaataatttaatattaaatttaaaaatgaggtagaaataaagtatagcgatataaataataaatttttttttatatttttgaggcggttttttgagttttttattttttttttaaggttattgaaatgtgttttttggagttagttcgtaaattacgtatttagaaaaatataattatatatttttaattttaagtattagaagtgaaagtaatggaatttcgatgtaaatataatattatttttttgatgagttattttgagtataataaatttgaattgtgttaatgttgggagaaaaaatttaaaagaagaacggagcgaatagtagttttttgtttcgttgattagaaatagtaggacgatattttttcgattggaggagagcgtttgcgttcgtatttagttggcgttcgtttttttgttttttttttagtcgtttttttttttttttttcgcgttttagttattcgggaaggtttgtttagcgtagttgggttttgattggttgttttgaaagtttacgggttattcgattggtgaattcggggttttttagcgcggtgagtttgaaattgttcgtatttggttttaaagttggtttttggaaattgagcggagagcgacgcggttgttgtagttgtcgttgcggtcgtcgcggaataataagtcgggtatagtggttggggttagggtcgtgtttaggggacggtcgagggtttcggagggcgagtattgaggaacggggttttttaagaaggtcggattggaggttagggatttgcgcggggttcggttgggtttcggggggcggtgggtagggttttcgtttgggtttggtcgtgtgagttatattgggttggttttagagggaggttatgggagtttagtttggcggggttaggcggcgtgggggtgggggttcggggttgtagttatgagtcgaggtcggttgtttttaggaattgtttgaagaggttttcgggttttgattgaagtaaaattcgtttttttacgttgagcgtttgcggagtagtaggtttttttttgggttcggtttttgcgcgttttgttatttcgtttcgggggtgggaaagtgggatcgtatttgggttaggtataggcgcgggtttttagagttaggtcgttttgagaaatcgattttggaattcgtgggtttttttgggtttgttttgtttacggtttcggtttatttggagttgttaagaatagttagtttaggtatttaatttttatgagtagtgtagtgtagttttttttatttaaaaagatatatttttgtttttttttggattgatttttttttgaagatgaatgtgagaaatagaatttaaaggtttattttgagtgtgttttataaatgattttattattagtgatgggtgttagaaaaatttaggtaattatgtttggagttttgacgttttattggtaaattttagaggaagttttgaatttttggttgttagtttttttttttaatttatttattgtgatttaagtatatcgtttttttgtttagtttttgatattgtttaggttataattagaattttatttgtggaattgtattttttatttttttgttttacggtgtttaagtgatattttttatttttggaaaaagtattttgaaagttttgagtatgtttgtttgtgattttagtaagtagaggaaaaagattaaaattgttacgtgggtaattgtaaatatttaaaatgtttttgtcgttttaaataaaatttttttaatgaatagtttgaatatattttagttttgtttttataattttaaaaaataatgttttgaataaaattaggagtattataaagcggtataaatttgttgaaatatttgggtataattttggtatacgtaggtattattttaaagtgttataaaaagggaatataattttggtttttgtttggaaagaatagataagttgatatttgaatttgagggttattttgattggaagaagttaaatattatattagtatagaatatatacgtttttaatgttttaggagttaagaaggatggaaagttattgtaggagtttttatttttgtaaatattgtttgaatgtaattaatatttatggaatatttatgttgtagtaggtattgtggaaaatgttttatatatagtgttttattaatgtttaaaattattcgagttagtggtatgtaattaagttagttttttttttattttagg

SEQ ID NO: 250 - DNA, 6664 bp, Artificial Sequence
  chemically treated genomic DNA (Homo sapiens)
tttaaagtgaaggaaaaattgatttaattatatgttattaattcgagtagttttaagtattaatgaaatattatatgtaaagtattttttatagtgtttattgtagtataagtattttataaatattaattatatttaaataatatttataagggtaaggatttttataataattttttattttttttgatttttgagatattggaaacgtgtatattttatattagtgtagtatttagttttttttaattaaaataatttttaaatttaggtattaatttgtttattttttttaaataaaaattagaattatgttttttttttgtgatattttaaagtagtatttgcgtgtgttaaagttatatttaaatattttaataaatttatatcgttttatgatatttttaattttatttaaaatattattttttaaagttatgaggatagaattaaaatgtgtttagattgtttattaggaaaattttgtttaaaacgataaaaatattttaagtgtttatagttgtttacgtgataattttaattttttttttttgtttgttgaggttatagataaatatgtttaagatttttaaggtattttttttaagagtaggaaatattatttaagtatcgtaaaataaaagaatgaaaagtgtaattttatagataaaattttaattataatttaaataatgttaaggattaagtagaaaaacggtatatttgaattataatgaatgggttaaaaaaaaaagttgataattagaagtttaagattttttttgaagtttgttaatgaaacgttagaattttaggtataattatttagatttttttaatatttattattgatgataaaattatttataaagtatatttagaatagatttttaagttttattttttatatttatttttaaagaaaaattaatttagaaagaagtagagatgtatttttttaaatgaaaaaaattgtattatattgtttatgagagttaagtgtttgggttgattgtttttaatagttttaggtgggtcggggtcgtgggtagagtaagtttaagaaggtttacgagttttaggatcggttttttagggcggtttggttttagggattcgcgtttgtatttggtttaggtgcggttttatttttttattttcgaggcgggatggtagggcgcgtaggggtcgggtttaggaaagagtttgttatttcgtaggcgtttagcgtgggggagcggattttgttttaattaagattcgaaagtttttttaggtagtttttgagaatagtcgatttcgatttatgattgtagtttcgaatttttatttttacgtcgtttaatttcgttaggttgggtttttatagtttttttttaaagttagtttagtgtggtttatacggttagatttaggcgaaggttttgtttatcgtttttcgaggtttagtcgggtttcgcgtagatttttgatttttagttcggtttttttagaggatttcgttttttaatattcgtttttcgaggttttcggtcgttttttagatacgattttgattttagttattgtattcggtttattatttcgcggcggtcgtagcggtagttataataatcgcgtcgtttttcgtttaatttttaagagttagttttgaagttaagtgcgagtagttttaaatttatcgcgttaaagggtttcggatttattaatcgggtagttcgtagatttttaaagtagttaattagagtttagttacgttgggtaggttttttcgggtggttagagcgcgaaagaaagaggaaagggcggttagagaaaaagtaggagggcgggcgttaattgagtgcgagcgtaagcgtttttttttagtcgggagagtgtcgttttattgtttttagttagcggagtaggaagttattgttcgtttcgttttttttttaaatttttttttttagtattggtatagtttaaatttattatatttaaaatagtttattaaaaaagtgatattgtgtttatatcgagattttattatttttatttttaatatttagggttaggagtgtatagttatgtttttttaaatgcgtgatttgcgggttggttttaaggagtatattttagtgattttaagaaggaaatggaaaatttaaaagatcgttttaaaaatgtaaaggaaaatttattatttatatcgttgtgttttgtttttattttatttttgaatttaatattaaattattttattatttatattttgtttattatataattaaaaatatttgaaatgtattaaattttaaaatatttttatattagaattttaaatatatagagagaggtatgtatttagagattgggttttattatgttgcgtatgttggtttttaaattttgggtttaagtaatcggttttagtttttagcgtagttgcgattataggtattcgttattacgtttggtttaaatataattaaaatataaaaatttataattttatgaggggagagaaagaggtttaaattatgttttaaataatttagtgttaaaaattttgtttttattgttatttattatatttttgagagagatttttgtatttattgtagttaatttttttttttttttttttgtttttttttttttttttttttttttttttattttttttttttttgtttgtttgcggagataatgtttttttatgttgttttagttggtttttaatttttaggttttagtaatttttttgttttggttttttaaagtgttgagattataggcgtgagttattagtttaatttaaatattattttaaaatttttttaaaataaataaatagaatagtaaaatagagttagatataataaaaatttattttaaggatttttggttgtattgattttaatgggatatagaataaagattgattattatatttattataagtatgtattagaagatttaaattaggatatggaatggaatttttttatttttgtgatatagagtatattatatgtatttaagtgtttaatattttttaatataatgagttgtatttattatttggtgttatatattgtatttggtttaattttgataatttttgtttttaggtaatagaggtagagtatttgggagttatggtgtaggtaggaatttaagaatttttgttggagtttaattatttttaaaatttatgtttaaaatttaaattttattttttaaatgaaaatttattgttttagagaagtgttttagggaattaggttgttttgtgtagtttatggtattggttttaatgaattttaatatgtttttttttttgagaggtttaagaggaatttaatttttatattatttaaaaatggtaattaatttattatatttattttatttttaatataaagaagattataagtttttatagttgtgatgttaggtgtattaatttaatttaattatttttttttataaagttttagaggttattgtaaatttatgttattattttggtaaatatagtttattattttttgggttaatttttatgtagtatttttaaagtgtaatattgtgttttatagatataaaaatgaataagatatagttatcgttggaggtgttgagggtaggggagtaggatgataattgggaatttttttttggtatttattttgtaatttatgttatagggtaatgtgagaatttagaggaggaaattgttaatgttagtagaagtgatatttgaataaaggttggggaaaggattttggagtgggttttttatatagaggaaattgtataagtagagtatagaggttagaaagttaatttaggtaatttagggtgttttttatggtagaatgtagggagtattgtattttgtgatgttaaagttagagaagggagtttatagttagaattttgatgagcgttgaatattgttttaaaggatttgagtaggagaggtatatatagttttggaattatattttaggaaaattattttagaggtggtattaaaaaaaaaaaaattgtagaggagagtaggggaaggtatgtgttttgaaaaattttatatttgtattttggtaaattttattttggaaggaaaagaaaagattagttggtattgtatataagtttttttggttttgttttttatatttacgtatttttatggtttgaatgtttgttgtttttttatttcgttaatttatacgttgaaggttttattttattgggatggtgtttggagatgaggttttgggaggtaattaggtttagatgaggatatgagggtggggttttcgtgatggaattagtgtttttataagaagagacgttgaagagtttggttgtttttatgtgaggttagaatgagaaggtatttgttagtgaggaagttagtttttgttagaatttgatgttgttcgttttttgaatttgtatattaagtttttagaattgagtgaaaataaaattttgttgtttaaggtacgtagtttatggtattttgttatggtagtttaggttaagataagtgttttttttagataagaaaaatgtgagaatatttgtttgaaaatatattttcgggtcgggcgcggtgttttacgtttataattttagtattttgggaggttaaggcgggtggattacgttgttaggagatcgagattattttggttaacgtggtgaaaatttatttttattaaaaatataaaaattagttgggcgtggtggtatatgtttgtaattttagttattcgggaggttgagttaggagaatcgtttgaattttggaggcgaatgttgtagtgagtcgagatggcgttattgtattttagtttagtgatagagcgagattttttttaaaaaaaaaagaaaagaaaagaaaatatatttcgggaaggaggtggaagaaattaataaaaatgtgttttttgtggaatataagagtgatttggtatagaggtggaaaggagagttttgtattttttgaatattgagttacgtgaatgtattattttagtttaaaaatgaacgaataaataaatgaatgaatgaattagttttgttaaggtttttattgttattggataaaaatggtaaaaattggttaggtatagtggtttatatttgtaattttagtattttgggaggttaaggtggaggattttttgaggttaggagtttgaggttagtttggtaatatagtaagattttgtttttatatagataaatatataaaaagaaaaaaaaaatttaaaagttgtcggaaaatgtatgtaaaagaagaagatttatttttttttatgttaatttagaaaggaaagtgatagaaaatataagatatatagatttaggtttttttattataagtgaaaatattgaattatcgttgttatgatagagttgggtgtttttttgattataaaagtaatgtgatttttttgtaaattttaagaaataatttaaagtgtaaaatatagataataaaagtttgttatatataatttttatgttttttatttttattttcgttttataaaaagagaaagagattattttaaatttgttggtagttgtattttaaatgtatatatgttaatttattttaattttttattggaattttagaaattgggtatggtgtagggagaagagatttatatgttaattttgggattaatgaggattaaggataataggtgagtagttgtggattttttatttaggtggggtgtaaatgtttataatgtaatatggtgaagattgttgtgtgtagaatatagtggagagggtattaggtaaggttttatagtaaagttgattgaattgagttttaaggaataaaaagagtttgttaagaagataaatgaaggtggagagtttgatttattgataagaaagaataatgtaagtttgtagattgaaattaatttagtacgttgaatataaatagaatttgggtgtttagtaagggttataaatattaggttaggtagttaaataatatttatattttgaaggtaatgtttaaggttatgttaaaagttttggattagacgttggatttgaataaaaaaatgtgaataaggtagtgatatggttataagtgggagttaggggggaaaagttatgaagagggttggtgatgtagtattagagttagtagataatggagggttttgtaatagttttagtaggtgttgaatttggggagatgttagttttaagaggaagaaatgataatgagatatttttaggagttgggattgggttaaaaaagggagaaggagttattagggatgatttgggtgtgtggttttgtaataggttgagggttttgttgttttagagagatgttaaggggtagttatggggtatggagtattattttgggtatattgatagtgaagtattgtgggatatttacgtggttggatatggttaagggtaagtgtaggttttatagggtttgaagtgtatattatttgcggattgttataatttgaaggtatgtgttttttttaaatgtatatgttggaatttaaattttaaggtgatggtattaagaggtagggttttcgggaggtgattattaaatttcgagggttttttttttattaatgggattaatgtttttataata

SEQ ID NO: 251 - DNA, 6815 bp, Artificial Sequence
  chemically treated genomic DNA (Homo sapiens)
ttgtttgcgaattaaaaatttagagtttttttgtgaattatgttgttaagaattgtagatttaagttttaagattgtacgaatttaaattttgattttatggttttagttggtatgaagatataaagataattttttagtaaaaatagttttgaaagatcgggcgtgatggtttatgtttataattttagtattttgggaggttgaggcgggtggattatttgtggttaggagtttaggattagtttggttaatatggtgaaattttgttttaattaaatatataaaaaaattagttgggtgtggtggcggatatttgtaattttagttatttagggaggttgaggtaggagaatcgtttgaatttaggaggtagaggttgtagtgagtcgagattatattagtgtattttagtttgggtgataaaagtgaaattttgttttaaaaaaaaaaaaaaatggtagaatgttatatggaaagttaatttttagagatagtaatttagatatttataatattatattgtttttttaagtatttatattaataaattaattaatatttgttgatttaatatggttagggatagtgttgggtttttataatttttaagtaattttagttagattttgtttttaaggagtttatgagtagtatgaggagataaaaaatagataaataattttaatttaggaagaatttgataaatgtatgataattattattagaatttagaggagaggaaattttttttgaatagagattaaaggaaggaataatgaatgtggtagtatttgggttggatttattataagaggtatgtttttttttgataagttaagaaagtggggatttaaggtagaagaaaagaaaagttttgagtttttggagtattaaaattttgtttggttgaagtataggttatagtcggaggagatggattaggaaggatcgttatgggtagagaggaagttttgaatttatgggggaagttatgatttgggttaaagatagagttgggttatgttaagatggattttgaagtagtaaaaaaaaatttaagaaagtaaataggttgtagggtttaggatgaagttcgggaggaaagggtagagtggtttttaggaggtcgttaggataggtaaggtaatgggttttaaagggagtggtcgaaatgtaatggaaaaagagagattgtaaagttagaaggtttaggaattgttttttgattaggtgtggaaggtaagggaaaattagttttcgaagaagatagtgagattttaatttgggtggttggagagatagtgatgttgggtatagatacggggaagttgagaggaatattatgtttgagaatggtgatttatatttgaataagtttgtaatgtttagtagatcgttggaaaagtggggttggagatatatttaacggaggagttagattaatttttatttttttttatttgagagagttagtaagttacggttggaacgtgtgtgtttagtaggagagggtagggagggaagttaagagagttgggagttcgagtgaagtttttgttaaaggtagaagaggaaagtcggcgtagtatagtatatttttttatttatgtttattaagtttagggataaggtttattaagatgagtttggaagagaatgttggagagaaagtggttaagaaaattgtttttattgaattttttgggttaattttgattgtaagtttttgaataattaaagtttgtgaggagatagttaatttttttattttttttatgttaatagtgaataattgtagatttttttttttttttttttttttttttttgttttttttttttttttttttgaatatttttgtttttttttgggattggtttagagtatgggtggttattgttgatttataggaggtattattgttattaataaagggtaatagtttttttttttaatatttatttatatttagtatttatttttaatattgattatggagagagtttttttgtgtttaaatattgtaatattgggggttttttaaagtataaaaatatatatttgtatgatggtattattaatatttttatggttttttattttttttttgtattggttttaagagttatttataaattttttagtaattgtatagtgttttagggttagagatcggttatttttggtattgtgattagagttatttaatatttaaggtggtgattaatgtttggtaataaagtttttattgggtgttatgtgttttgggattttgagcgtgggtattttaggagtattttagtattgcgtgttagtattatggtcgagagaatagttgagaaagtggttaagaggtggatttatgtgaacgttattgggaaatgagagatttcgtttttaattacggttagtgtaattcgaaagtttaaaattagtttaaaataaaggtatttatttttattttatgtttatattttaggtttttaataatacgtattttttatatgtttatagaaagtagttaattgagttatttatggaaaggtttgtgggtttggttaacgaagtggaggagtattatattttagttggaaatatatttttagaatgttaaaatatttattttaaagtttggttttttggtgtaatcggaggtatggtaatgtttttgtttagagattgggggttagggttagtaaggtatttgatttatatgtattttagaaggtttttattgttaaattatattttttcggaaaaattatttatgttttattttgtaaatttgatatttatatatttttgattggtattttattttagtcgtaagattatgatttatagtaagtttgtttttttttttgtttggggtggtagtagaaagtatagggtattttttagtttttaagggtaggggtaaaggggttggggttttttttttttagtatagttttttttggttgtgttatattgttttttgtgagtagatagtaagtttttttttattttttattgttatttatttagcgttgtgtagtagtttagttgcgtgtttgtcgggaggggttgttaagtgttttgtttattggttgtttttcgaatttttgttattttacgtataaatatatttatatattttttttgtttagtttatatattgagttattcgtatatgcgagtatatttttttttttttttttattttttcggtttttgatttttataagtttatggaatatttttggaaagacgtttttgatttagtagggtaggtttgttttgatttttttttttgtagttttagtattttgagaaagtaatttatttttttggttagtgtttgtattttagtagggagatgaggattgttgttttttatgggggtatgtgtgtgtttttttttttttttaggatttgtaggattttttgtgttatttgtatataatttggtaggtttatattttttaagagttttatgaagtgttttttgtatgtgttttaaaaaggtatttgaaaattgaaagtgtgatttatggaaattaaattatttgtaaaaaattgttttggaaagtaatgattgttggttataaagggaaatatttgcgatgtatttaatgtgtttttaattttttatttgttgataatttatagttattaatgttaaattcgattttggttttagttatatttgtatattgtttaataatggtttatttttgtaagaattagataaaatgtatatttgatataaaatagttaaaaatgtaatttttagtaatagtaagtttggtatttagatagattatgaatatttcgttagatattttgttgggtgtttgggatagtaattaaaataaagtattgatagttgtattagagtttattaggttgtagtaaaggaagtttatttaaaagtataaattatttaagattatagacgtatgatatattttatttattttttgtttttttaatatgtatatatatatatatatatatatatatatatatatatgtgtgtgtgtatgtgcgtgtgtatgtttaatttttaatttagttaaaaatttttttttatttgttttttatttggatatttgattttgtatattttagtttaagtgaatcgagaagatcgagttgtaggattaaaggatagatatgtagaaatgtattttaaaaatttgttagttggattagatcgataatgtaatataattgttaaagttttggttcgtgatttgaggttatgtttggtatgaaaaggttatattttatatttagttttttgaagttttggttgtataattaatttgtggaaggtatgaatatttatgtgcgttttaattaaaggtttttttgaattattttttatatgagaatttttaatgggattaagtatagtattgtggtttaatataaatatataagttaggttgagagaattttagaaggttgtggaagggtttatttattttgggagtattttgtagaggaagaaattgaggttttggtaggttgtatttttttgatggtaaaatgtagttttttttatatgtatattttgaattttcgtttttttttttttagatgttttttgttagtttttttagttgttaaatatagttgtttgtggttggttgcgtatgtaatcgtatattttattttatttgttttatttcggttatagtgtagttttttttagggttattttatgtatatattacgtatttttagttaacgaggagggggaattaaatagaaagagagataaatagagatatatcggagtttggtacggggtatataaggtagtatattagagaaagtcggtttttggattcgtttttcgcgtttattttaagtttagttttttttgggttatttttagtagattttcgtgcgttttcgttttttggtcgtgaaatttagtttttatttagtagcgacgataagtaaagtaaagtttagggaagttgttttttgggatcgttttaaatcgagttgtgtttggagtgatgtttaagttaatgttagggtaaggtaatagtttttggtcgttttttagtatttttgtaatgtatatgagttcgggagattagtatttaaagttggaggttcgggagtttaggagttggcggagggcgttcgttttgggattgtatttgttttcgtcgggtcgttcggttttatcggattcgtaggttttcggggtagggtcggggttagagttcgcgtgtcggcgggatatgcgttgcgtcgtttttaatttcgggttgtgttttttttttaggtggttcgtcggtttttgagttttttgttttgcggggatacggtttgtattttgttcgcggttacggattatgattatgattttttatattaaagtatttgggatggttttattgtattagatttaagggaacgagttggagtttttgaatcgttcgtagtttaagatttttttggagcggtttttgggcgaggtgtatttggatagtagtaagttcgtcgtgtataattatttcgagggcgtcgtttacgagtttaacgtcgcggtcgtcgttaacgcgtaggtttacggttagatcggttttttttacggtttcgggtttgaggttgcggcgttcggttttaacggtttggggggtttttttttatttaatagcgtgttttcgagttcgttgatgttattgtattcgtcgtcgtagttgtcgttttttttgtagttttacggttagtaggtgttttattatttggagaacgagtttagcggttatacggtgcgcgaggtcggttcgtcggtattttataggtattcgcgttcgcgtcgttcgtcggggtggtcgtcgcgttcggtaggagggagggagggagggagggagaagggagagtttagggagttgcgggagtcgcgggacgcgcgattcgagggtgcgcgtagggagttcggggcgcgcggtttagttcgggggttttgcgtgtagttcgcgttgcgtttagagttaagttttttcgtcgggtagttgaaaaaaacgtattttttatttatttatcgttcgtgcgagaggtagattcgaaagttcgggttttttaataaaatatacgttggaaaattagataaagtagtagttatttgtgggggaaaatatttttaggtaaataaatacggggcgttttgagttatttgggaaggtttcgtttttggtatttaaagttgggggtgtttggagttagtagagtttagtagagttttatttatttttttaatgtttttgtttaatgtgttttttaaatttttttttatttagattatttgattggaaatatgttagttatgatgatgattttttgggaagcgatttttgttattcgttttttttttttttttattttacgttttggggttttagagagcgattgggagttgaatgggtttgatttcggagttagttggttgagttcgcgttggagcggattgttggtatgtgatttttgatagtcggaaatttgtaggtgtttcgcgagtttaaaataagttatatggaagtataagtgtttaaaaataattttttgttagtttagtgataagtttgttttattcggggagaatgtttcggagtggcgtgcgggttagttagggtttgcgtttcgtagttattgtggaaggagcgcggtcggtttaggatataggagattattttgtgattttaatggcgaaggttgtgtgtttttattttaatttttttttttataagaattgttttttttttttttttttttttttttatttttttttgtttagttttttttttt

SEQ ID NO: 252 - DNA, 6815 bp, Artificial Sequence
  chemically treated genomic DNA (Homo sapiens)
aaaaggagaaattgggtaagagaaaatgggagggagaggagagggagaaagaataatttttgtagggaaaaaaattaaaatgaggatatataattttcgttattgaagttataaagtggttttttgtgttttggatcggtcgcgttttttttatagtggttgcgaggcgtagattttggttgattcgtacgttatttcggggtatttttttcgggtgggataggtttgttattgggttggtaggagattatttttaagtatttgtgtttttatatggtttgttttaaattcgcgggatatttataaattttcggttgttagaagttatatgttagtaattcgttttagcgcggatttagttagttaatttcgaaattagatttatttaatttttaatcgttttttaaagttttaggacgtggggtggggaggaggggaaagcgggtgataggaatcgttttttagaaagttattattatagttgatatatttttaattaaatagtttagatgaaaggaaatttggggagtatattaaataaaaatattaaaaggataaataaaattttgttgagttttgttaattttaaatatttttaattttaaatgttaagagcgagatttttttaagtgatttaaagcgtttcgtgtttatttgtttggaggtgtttttttttataaataattgttgttttgtttggttttttaacgtgtgttttgttaggaagttcgggttttcgggtttgtttttcgtacggacggtaagtgggtggagagtacgttttttttagttgttcggcgagagaatttgattttgaacgtagcgcgggttgtacgtagaattttcgggttgggtcgcgcgtttcgggttttttgcgcgtattttcgggtcgcgcgtttcgcggttttcgtagttttttaggttttttttttttttttttttttttttttttttttgtcgggcgcggcggttatttcgacgggcggcgcgggcgcgggtatttgtagaatgtcggcgggtcggtttcgcgtatcgtgtagtcgttgggttcgttttttaggtagtagggtatttgttggtcgtggggttgtaggaaaggcgatagttgcggcggcgggtgtagtagtattagcgggttcggagatacgttgttgagtggggggaaattttttaggtcgttggagtcgaacgtcgtagttttagattcggggtcgtaggggaggtcggtttgatcgtagatttgcgcgttggcggcggtcgcggcgttgaattcgtaggcggcgttttcggggtagttgtatacggcgggtttgttgttgtttaggtatatttcgtttaggggtcgttttagggggattttgagttgcggacggtttaggggttttagttcgtttttttggatttgatgtagtagggttattttagatgttttggtgtggagggttatggttatggttcgtggtcgcgggtagggtgtagatcgtgttttcgtagggtagaaggtttagaaatcggcgggttatttggaaaaagagtatagttcgaggttagaggcgacgtagcgtatgtttcgtcgatacgcgagttttggtttcggttttgtttcgggagtttgcgggttcggtgaagtcgggcgattcgacgggagtaagtgtagttttaggacgaacgtttttcgttagtttttgggttttcgggtttttaattttaagtattggtttttcgagtttatatgtattataaaggtgttggaggacggttagggattgttgttttgttttgatattggtttaaatattattttaggtataattcgatttggagcgattttaaagagtagtttttttgaattttattttatttgtcgtcgttgttggatagaggttgagttttacggttagggggcgggggcgtacgaggatttgttaaaggtggtttagggaagattgggtttaaaataaacgcgaaagacggatttaggggtcggttttttttaatgtgttgttttatgtgtttcgtgttagatttcgatatatttttgtttgtttttttttttgtttgatttttttttttcgttggttagaaatacgtagtgtgtatataggatgattttggggaggattatattgtaatcgagatagggtagatagaatggggtgtgcggttgtatacgtagttagttatagatagttatatttagtagttgggggaattgatagggggtatttgaggggaagggggcggagatttagggtatatatataggaagagttgtattttgttattaggagaatgtaatttgttaggattttagtttttttttttgtaaaatgtttttaaagtagatagatttttttataattttttgagatttttttagtttgatttgtgtgtttatgttggattatagtattgtatttggttttattaggaatttttatgtgaaggatgatttagaaaaatttttggttagggcgtatatgggtgtttatgttttttataggttggttatgtaattaaaattttagaaaattgaatataaaatgtgatttttttatattaaatataattttaggttacgaattaaagttttggtaattatgttatattgtcggtttggtttagttaatagatttttaaaatgtatttttgtatgtttattttttagttttataattcgattttttcggtttatttgggttaggatatgtagaattaaatatttagatgaaaaataaatagaaaaaagtttttaattgaattaaaagttaaatatgtatacgtatatatatatatatatatatgtgtatatatatatatatatatatatatatatatattaaggagataaaaaataggtgaagtatattatgcgtttataattttggatagtttatatttttgaataaattttttttgttgtagtttaatagattttgatataattattaatattttgttttaattgttattttaaatatttaatagagtatttgacgaagtgtttatggtttatttaaatgttaagtttattgttattaagagttatatttttgattattttatattaagtatatattttatttaatttttataaaaatagattattgttggataatatgtaaatgtagttgaagttaaaatcgagtttagtattaatgattatagattgttagtaaataaagggttaaaaatatattaggtgtatcgtagatatttttttttatggttagtaattattattttttaaagtaattttttatagatgatttaatttttataaattatatttttaatttttaaatgtttttttaaaatatatgtaaaaagtattttatagggtttttaaaaaatgtgaatttgttaaattatatgtaaatggtataaagaattttataagttttgaaagaaaaaggagatatatatatatttttatggagaatagtaatttttatttttttgttaggatatagatattagttagaaaggtaagttgtttttttaaaatgttaaagttatagagagagaaattaaaataagtttattttgttggattaagaacgtttttttagaaatgttttatgggtttgtagaagttaagggtcgagagagtgagaaggaaggaaggaatgtgttcgtatgtgcgagtggtttagtgtgtgaattaggtagagagagtgtgtggatgtgtttgtgcgtggaatggtagggattcgggaagtagttagtaggtagggtatttggtagtttttttcggtagatacgtagttgggttattgtatagcgttggatgaatggtagtggggagtgaggggagatttgttgtttgtttatagggagtagtgtggtatagttagagaaagttgtattggggaggagaaattttagtttttttgtttttatttttggaggttggaaagtattttatgttttttgttgttattttaagtaagaggaaaaataggtttgttgtgaattatagttttacggttaaaatagaatgttagttaaaagtgtatggatattaagtttataaaataggatatgggtggttttttcgaaagaatataatttaataataaaagttttttgggatatatgtggattaaatgttttattggttttagtttttagtttttgaatagaggtattgttatgttttcgattgtattaggaaattagattttggaataaatgttttggtattttagggatgtgtttttagttgaaatgtaatatttttttatttcgttaattaaatttataaatttttttatgaatagtttagttgattgttttttgtaaatatgtgaaaaatacgtattattaaaagtttaggatatgaatataagataaaggtagatatttttgttttaaattgattttaggttttcgagttgtattgatcgtgattgggaacgaggttttttattttttagtggcgtttatatggatttattttttgattatttttttaattattttttcggttatagtattaatacgtaatattgaggtgtttttagagtgtttacgtttagggttttaggatatatgatatttaatggaggttttgttgttagatattagttattattttggatattaaatgattttaattataatgttaggagtggtcggtttttggttttgggatattatgtagttattgagagatttatgagtggtttttgagattagtataaaaaagaaatagaaagttataaaaatgttaatgatgttattatgtaaatatatgtttttgtgttttgaaagatttttagtattgtagtgtttgagtataggagagttttttttatagttagtattgaaaataaatattggatataaataaatattgaaaagaaagattgttattttttgttggtgatagtggtgttttttgtaggttaataatggttatttatgttttagattagttttagaaaaaagtaagagtatttagggagggaggagagaggaataggggaaaggagaaggaaaggaaaggggatttgtaattgtttattattgatataggaagaataagaaggttagttgtttttttataggttttgattgtttagagatttataattaaagttagtttaagaagtttagtaaaggtagtttttttaattattttttttttagtatttttttttaaatttattttggtgagttttgtttttgggtttggtgagtatgggtgggaaagtatattgtgttacgtcgattttttttttttgtttttggtaaaaattttattcgggtttttagtttttttggtttttttttttatttttttttgttggatatatacgttttagtcgtgatttattggtttttttaggtgaagaagggtaaagattgatttggttttttcgttgaatgtgtttttagttttatttttttagcggtttgttgggtattgtaggtttgtttaaatatgagttattatttttaaatatggtgttttttttaattttttcgtgtttgtgtttagtattattgtttttttagttatttagattaaaattttattgtttttttcgagggttgatttttttttgttttttatatttaattaagaggtaatttttaagttttttagttttataatttttttttttttattgtatttcggttattttttttgagatttattattttatttgttttaacggttttttaaggattattttgtttttttttttcggattttattttaaattttgtaatttgtttatttttttggatttttttttattgttttaggatttattttgatatgatttagttttgtttttaatttaaattatagttttttttatgagtttagggttttttttttgtttataacgattttttttagtttatttttttcgattgtaatttatgttttagttaagtaaaattttaatattttaagaatttaaggtttttttttttttttattttaaatttttatttttttggtttgttaggggaaagtatgttttttgtaataggtttagtttaaatgttattatatttattatttttttttttagtttttatttaaagaaaatttttttttttttgaattttagtagtagttattatgtatttattaaattttttttgaattagagttatttatttgttttttatttttttatgttgtttataagttttttgaggataaggtttggttagaattatttgggaattatgagaatttagtattgtttttggttatgttaagttaataaatgttggttaatttattgatatagatatttaaaaggataatgtaatattataggtgtttggattattatttttaaaagttaattttttatgtgatattttattatttttttttttttttgagatagagttttatttttgttatttaggttggagtatattggtgtgatttcggtttattgtaatttttgttttttgggtttaagcgatttttttgttttagtttttttaagtagttgggattataggtgttcgttattatatttagttaatttttttgtatgtttagttgagataggattttattatgttggttaggttggttttgaatttttgattataggtgatttattcgttttaattttttaaagtgttgggattataggtatgagttattacgttcggttttttaaaattgtttttgttagaagattatttttgtatttttatgttaattgaggttataaagttaaaatttaaattcgtataattttgaggtttaagtttgtaatttttggtagtatgatttataagagagttttgaatttttagttcgtaagtag

SEQ ID NO: 253 - DNA, 5527 bp, Artificial Sequence
  chemically treated genomic DNA (Homo sapiens)
ggttttttgttgttgttaaattaataattttagtttttgggtttagttatttgttgttgttaaaaatgttgttgagagtgatggagaggtgttttagtttttattttatagattagaaaattaaggtttagagaaattaagtagttttggagataggagttatggtttttttatttgagttattattttgaaatattaaggataagttaattttattaatagttttaggtttgtgagaaatgggtttggtttattttgaagattgtaaataaataaaaaaatagattgttttattattgatgagaaatatgagttattttgttaggaattgaaagtatagttgtttataaaaaagttatgtcggggtttagtttttttaggtttttgtgtgtgaaaaattatttagttaaagttttttttttatttttttttgtgtttagtaggatgttgaaatttttggaaaagataatggaaattaggggtaggaagagaatagtgtggggtgttaaatagattttagtaatttttttgtttacggttatttttgcgtagatatttcgattttttatgcgtaggtggagtagcgttttttagttttttttagaggtttttttttgtttgttttttagttatatcgtttgagattgataacgttttatagtaagacggaaatttttttttatagtattattttgcgattttgtagttataaagttgagatttttgaacgtggtatttttttgtttttttattgttttacgtgtatttgtgttattttttttgttttatcgtaaatatatttttaaaatttttattttttttatttagaaatagaattataagcggatggttaaataatttaaataaatggtttatggggaaaagtgaattttatattgttttttaaatttttagtgttttttatggagataattattgtttttaatgttttgaatatttttttagagatattttatttttatataagtatatgtgtatttgtgttttttttttattttttttttataaatattagtagattgttttgtattttggttagtttatttaatatattttggagttaggtgcggtggtttatgtttgtaattttagtattttgggaggtcgaggtgggcggattatttgaggtcgggagttcgagattagtttgattaacgtggagaaatttcgtttttattaaaaatataaaattagttaggcgtggtggtatatgtttgtaattttagttattagggaggttgaggtaggagaatcgtttgaatttgggaggcggaggttgcggtgagtcgagatcgtgttattgtattttagtttgggtaatagaatatatagatttgtttgattttttttatgattgttatagttttattgaatgtatggattattagtgttttagttagtattttagtgatgggtatttagggattataaattttataagggtagaaataatattttatttattttttgtttttgatatggtttggatgtgtgtttttgtttaaattatacgttaaggtaattttttatgttagaggtggggtttggtggaggtgattggattatggggatggattttttatgaatgggttagtattatttttttggtgttgtttttgtgatagagtttttatgagatttggttgtttaaatgtgtgtggtatttttttatttttttggttaagtttttgttatgtaagatgtttgtttttgttttgttttttgttatgaataaaagttttttgaggtttttttagaagtagatgttattatgttttttgtatagtttgtggaattgtgagttaattaagttttttttttttatgaattatttagttttaggtatttttttgtaatagtgtgaggatgagttaatatagttttttatattgtaatttaaggtaatgttttgtataaagggatgaattagattgtttagtaattaaaatataaatataaattataagtatatttatttatgaattgggggatagtttttatttgattttgagttttgatatttgttgttttgttttgttaaaaatgtgttagtttttatttagttttttattagttatattattaattaatatgtataatatgtataatttgttaggttaggaggaaatttatggatataagaaatgttttttttttttaggaaatgataatttgttttgggagagaaggtaggtattttttggtaaaagtgatataataaaataattaaaaaaagatggattttttttttttttttgagatggagttacgttttgttatttaggttggagtgtagtggcgcgatttcggtttattgtaatattcgttttttaggtttaagcgatttttttgttttaggttttcgagtagttgggattataggtatttattattacgttcggttaatattttgtatttttagtagagacggggttttattgtgttagttaggatggtttcgattttttgattttgtgattcgtttgtttcggttttttaaagtgttgggattataaatatgagttattgtattaggcgaaaagatggattttttaaaaaaggtgttaggataattaggtttttatttgtaagaaagtaaagttagaagtttattttagattatgtatattagtataaaaatgttaaatggtttaaagataaaatgttaaaataagtttagaaaggtattaaaagaaaatatagaaaatatagtattagtaaaaatttttttatataagatgtaaaagttagaagttataaaggaaaaggttgataaattagaatagataaaaatgtaaaatttttgtataatataagatataaagaatgaatttaaagatatataatgaaggttaggaagatgaagatgttttggcgatgagtggtggttatatattagtattaatgtatttaatgttattgaattgtatatttaaaatgatgaaaatggtaatttttatgttatgtgtattttattatataaaaaaagatatgaaatgaatcggggaaaatatttgttatataattaagaatgaaggtttttaataaaatttgtaaaattatatatatttttaggaatgaattaataaataatttttatgaattagaaaaaagtgataatttaattaaaaaatgaataagggatataagtaatgtgttttatagaaaaaataaaaattgataatgaagttatgaaaaaatgtttagtttttttagtaattgtataaaataaattaaaataatgagatattatttttaagattagtaaatgttaaagaaaaataataattggtgagggtgtggggaagtgggtatttatatttatgtttggaaatataaattggtgtaattttatagggagagtaattttataatattttttaaagatttatatgtataattttatggtagagaaatttattttttttttaggatttttttttttttaaaaatagtgatgtggatgaaaaatatatgtttattattgtatagggtataatagttgaaaattggaaacgataatatttatattttttttagtaggggaatggttaaataaattttataagttatttggtagatattaggtatgagttaaaagttagggtttagttagagatggaaagtatattagtaatttgaaagggaaaatgtaatatgaagaattattaattagtaaaagaaggttaattgttaaaggtataagagtatttaagttgtttgtagttagtaggtttcggttggtgagtaggaagttgttcgttgggaggttgttaaagttttttgaaggtgagtattattggttttataagttgttggtagttatggcgttaagagtaggaagagaagtattagaattcggaagagaaatttagttttttgttaggttttgtatcgtttttttggcgttttttattgataaagttagtaaaattgtgtcgttagtaaaggagatttttttatgggatgtagtttggtgttattaaagagaatagagtggatttggagtttagatgtaatataatgattgatattggtatagtatatttattttgtttttgtaaataaaatggtatatgtgatgtttttttttgtttttttgtatataaaataatatttgtttttatttattatgtatttatgtttttattttgtatgttaggagttaagtattttgtatgtattaatttattttgtttttataataatttttatatgtaggaattattatagttattttatgaatgagtcgaggaaggtattgagacgttaagtaatttgtttaaggttacgtagttagtaagtggtagagtaagaattattatggttttataagtttaggaaaaagtttgaaagaattaaaatgttaatagcggggattttaaggaagtattgaagaggttatgggagaagtttttattttgttaaaaaattagttttttaaataaataaatatagtgaggtttttttagaagtagatgttattatgttttttgtatagtttgtggaattgtgagttagttaaattttttttttttataaattatttagttttaggtatttttttataatagtgttaggatgagttgatatagttttttatattgtaatttaaggtaatgttttgtataaagggatgagttagattgtttagtaattaaaacgtaaatataaattataagtatatttatttatgaattggggggttgttttgtgtgtatagataaggtatattttttaaaaaaattatttttttaagaagaaaataaattagttaataaacgataatttatagtgttaggaagtgagaaataagtgtgtgataaacggtggagaatgggagtatttttcgtagtgggcgggaggagacgaggagggcgttttttggggagtggtagtggttggagtaaaggtttggaggaggtaagttatgtgttttgagtttttggtttttgttttattttgtgtttgagttggtttgaaggttggttgtttagattgagttttttgtttgtttgtatttcgttaatagttttagaagaaggtgattggtggttgtttgaggaatattagtgggtaagagaattagtatttttggagtatttgttgtttgtgagattaagtattatgtatattgttttatttattttttatagtaattttattaagtagtttttttttacgtgaaaagatggaggttgggtggagtaaaaggaggtatttagagtttttagtaagtgagaggtagagttgggatttgaatttagatttgtttgatattgaagtttaggttggttttattttttcggattgttttttagggagtagaagatagatattttattttagttggttgtttttagaagtttgattttgttggtttaaaacgattttagttttttgtttagaggttgcgggttgcgggttaagatattagtagaaggagggtttagttagagaggttgatatgggtttttatttatcgttatttttttttttttttagg

SEQ ID NO: 254 - DNA, 5527 bp, Artificial Sequence
  chemically treated genomic DNA (Homo sapiens)
tttggaaggaaggagagatgacggtgagtagaagtttatgttagtttttttggttgggttttttttttattgatgttttgattcgtagttcgtagtttttgggtaaggaattaaagtcgttttgagttagtagggttagatttttagaagtagttagttaaggtaaaatatttgttttttattttttggaaagtagttcggagaggtggaattagtttagattttagtattaggtagatttggatttaaattttagttttgttttttatttgttgaggattttaaatatttttttttgttttatttagtttttatttttttacgtggaaaagaattgtttggtaaggttgttgtggggagtgaataaagtaatatatatagtgtttaattttatagatagtagatgttttagaaatgttaatttttttgtttattggtattttttaggtagttattagttatttttttttgaagttgttggcggggtataggtaggtaggaagtttagtttgaataattagtttttagattagtttagatataaggtgaaatagaaattaaaaatttagagtatatgatttattttttttaaatttttgttttaattattgttattttttagggaacgtttttttcgttttttttcgtttattgcggagagtgtttttattttttatcgtttattatatatttgttttttattttttggtattgtgagttgtcgtttattaattggtttattttttttttggaaaaataatttttttaaaaaatatattttatttatgtatataaagtagttttttaatttatgaatggatatgtttgtggtttgtatttgcgttttaattattaagtaatttggtttatttttttgtgtaaagtattgttttaggttatagtgtaggaaattgtattagtttattttagtattgttataaagaaatatttaagattggataatttataaagaaaagaggtttaattggtttatagttttataggttgtataggaagtatagtgatatttgtttttggggaagttttattgtatttatttatttgaaggattgattttttaataaagtgaaaattttttttatggtttttttaatgtttttttgaggttttcgttgttaatattttgatttttttagatttttttttaggtttataaagttatagtaatttttgttttgttatttattagttgcgtgattttgggtaagttatttaacgttttagtgtttttttcggtttatttataaagtagttataatgatttttgtatgtgaaggttattatgagaataaaatgagttaatatatgtaaaatatttagtttttggtatgtagagtaaagatataaatatataataagtagaaataaatattgttttatatatagagagataaagagagatattatatatattattttgtttataaaagtagggtaagtatattgtgttagtattaattattgtgttgtatttgagttttaagtttattttgttttttttggtgatattaagttatattttataaaaagattttttttgttagcggtataattttattggttttgttagtagagggcgttagagggacggtgtaaggtttagtagaggattggatttttttttcgggttttggtgtttttttttttgtttttaacgttatgattgttagtagtttgtagaattagtggtgtttatttttagggaattttggtagttttttagcgggtagttttttgtttattagtcggggtttgttgattgtagatagtttgagtgtttttgtatttttagtagttagtttttttttattagttaataattttttatattatatttttttttttaaattattggtgtgttttttatttttaattggattttaatttttagtttatgtttggtatttattagatggtttgtaaaatttatttaattatttttttattgaagggaatgtgagtattatcgtttttagtttttagttgttatattttgtgtagtagtgaatatgtgttttttatttatattattgtttttgaaggaaaaaaaattttggaagaggaataaatttttttgttatagggttgtgtatgtaagtttttggaaaatgttgtgagattgttttttttataaggttgtattaatttatatttttaaatataggtgtaagtgtttatttttttatatttttattaattattatttttttttaatatttattaattttaggggtaatgttttattgttttagtttgttttgtgtaattattaaggagattgaatatttttttataattttattgttaatttttattttttttgtgaaatatattgtttatattttttatttattttttagttggattgttatttttttttaatttatagaaattatttgttgatttatttttaaaagtgtgtatagttttatagattttattaagggtttttatttttagttatgtagtaaatatttttttcgatttattttatgtttttttttatgtgatgaaatatatataatataaaaattattatttttattattttaagtgtatagtttagtaatattaagtatattaatattgatgtgtaattattatttatcgttaaaatatttttatttttttaatttttattgtatgtttttaaatttattttttgtgttttatattatataaaagttttatatttttatttattttaatttattaatttttttttttatgatttttggtttttatattttgtgtagggaaatttttgttggtgttgtattttttatatttttttttaatatttttttagatttgttttaatattttatttttaagttatttgatatttttgtgttggtatgtatggtttgaggtgggtttttaattttatttttttgtaggtggggatttgattattttaatattttttttaaaaaatttattttttcgtttggtgtagtggtttatgtttgtaattttagtattttgggaggtcgaagtaggcggattataaggttaggagatcgagattattttggttaatatagtgaaatttcgtttttattaaaaatataaaatattagtcgggcgtggtggtgggtgtttgtagttttagttattcgggagtttgagataggagaatcgtttgaatttgggaggcggatgttgtagtgagtcgagatcgcgttattgtattttagtttgggtgatagagcgtgattttattttaaaaaagaaaaaaagatttatttttttttgattattttattatgttatttttgttaaaaagtatttgtttttttttttaaagtagattattattttttagaagggagggatattttttgtatttataagtttttttttgatttggtagattgtatatgttatatatgttggttggtgatatgattgataggaagttgaatgagaattagtatatttttaataaagtaaagtagtaggtattagaatttagaattaaataaaagttgttttttaatttatgaatggatatgtttgtggtttgtatttgtgttttaattattaagtaatttggtttatttttttgtgtaaagtattgttttaggttatagtgtaggaaattgtattagtttatttttatattgttataaagaaatatttaagattggataatttataaggaaaagaggtttaattggtttatagttttataggttgtataggaagtatagtggtatttgtttttggggaagttttagagagtttttatttatggtagaaggtaaagtaagggtaagtattttatatggtaggaatttgattaagagagtggggaggtgttatatatatttaaataattagattttatgagagttttattataagaatagtattaaagggatggtgttaatttatttatgaaggatttatttttatgatttaattatttttattaggttttatttttgatatgggggattattttgacgtgtgatttgggtagggatatatatttaaattatattagaaatagaggatgggtaagatattgtttttgtttttatgaagtttgtgatttttaaatgtttattattaaggtgttagttggagtattgatgatttatatatttaatggagttgtagtagttatgaaaaggattaagtagatttatatgttttgttgtttaggttggagtgtaatggtacgatttcggtttatcgtaattttcgttttttaggtttaagcgatttttttgttttagtttttttagtagttgagattataggtatgtgttattacgtttggttaattttgtatttttagtagagacggggtttttttacgttggttaggttggtttcgaattttcgattttaggtgattcgtttatttcggttttttaaagtgttgggattataggtatgagttatcgtatttggttttaagatatgttaaatgagttaattaaggtgtaaaatagtttgttagtgtttgtggggggaaaatgagggaaggatataaatatatatatgtttatataagaataaaatatttttgaaagaatatttaaaatattagaaataataattatttttataaaaggtattgaaagtttgggggatagtgtgaaatttatttttttttatggattatttgtttaaattgtttaattattcgtttgtagttttatttttaaataaagaaaatgggaattttagaagtatgtttacgatgaaataagaaagatgatataggtatacgtgaaatagtaagggaatagaagagtgttacgtttagaagttttaattttgtggttgtagaatcgtaaggtggtgttgtaaagggaggttttcgttttgttgtagggcgttgttaattttaggcgatgtggttggaaggtaggtagaaggaagtttttggaaagaattaggaaacgttgttttatttgcgtatggggggtcgaggtgtttgcgtagagatggtcgtgggtagggaggttgttgagatttgtttagtattttatattgttttttttttgtttttgatttttattgttttttttagaaattttagtattttattgagtataaagagaaataaaaggggaattttgattgagtggttttttatatataaggatttggagaggttggatttcggtatagtttttttatgggtagttgtatttttaatttttggtagaatgatttatattttttattagtaatggagtagtttatttttttatttgtttataatttttaagataaattaagtttattttttataggtttaaaattgttgataaagttggtttgtttttgatgttttaagatgataatttaagtggagaggttatggtttttatttttaagattatttagtttttttgggttttgattttttgatttgtaaaatgggaattaaaatatttttttattatttttagtaatatttttagtagtagtaggtggttaaatttaagggttggagttgttaatttggtagtagtaagaagtt

SEQ ID NO: 255 - DNA, 10224 bp, Artificial Sequence
  chemically treated genomic DNA (Homo sapiens)
agtttttatagttttagtatcgttttttttattttatttcgattgcgtttttgttgtttatttttgtttatttattttaattttagtgttttttttagtttttgggttttaggtgatatattagttagtgggatatgggtttttataggtatttttagtttaatttagttttttttttttttttggttttttggttagtatttgtattatattggtttttattggatatttttgtagtttcgggttttttttatagatatattgttggattagttgtttaatttggtttatttgtagagttttttggtttatttgattttaattgaaatttagttttttaagaaggatttggtgttggaataggtaggtattggaaagttagttgtttaggattattgttttattttattagtatttttttgttattttttattttttttttttagattttagaaatttgggagcggttggagcgagaaaatagaggtaagtggtaggtaattgttaagtattagttttagtatgtgtttagttttttagagtaggatttgcggttgtaggcgcgaaggtaaggtttgtggaaatggtagggagggtggaggggatgtaggaggtatggatgtgggtggggtgtttttattttttagggttagttagatttttttgatttttttttaggtgggttgagatttataggttggatgtgttagaggtagtggttttagagcggtttcgttgtgtttattgtagtgtagaggtttttaagcgttgtttacgatgttagaatgagtggtattgttgtaggtgagggtattttagaattttggatttttaagttttatttttatattttttatatgtattgttatttttaatatttatttgtttgtagggagtgttaagttaagtattgggaaaagtatggaaagatttgtgttttggtagtttagggtgatagagttaaatgagggttgtagttgttgagggtcgattatttatgttaagggaatttatttagaatgtatttttgaattttaagattacggtttagtttttgtcggagttttagttttcgtagtggagagtagagcgggcggtaaagttgttgatcgattttttttttttttattttaagtgaaggttcgagattttttgttttatttagtgggtaggttaagtgtgttgttttagtaaatcggattaggagggttagggtcggatgtggggattttttttttttagtatagtaaagttggtttttagaaatacgggtattttcgcgtggtgttttgcggtcgtcgtcgttgtggtcgttcggggtggggtgtgaggaggggacgaaggagggaaggaagggtaaggcggggggggttttgcgagagcgcgtttagtttcgttttcgggttttatagtttttgtatttaggtttttattgcgcggttttttttagttttttttcgtcgtttagtttggattttgggggaggcgttgaagtcggggttcgttttgtggtttcgttcggttcgcgtttgttagcgtttaaagttagcgaagtacgggtttaatcgggttatgtcgggggagtttgagtttattgagttgcgggagttggtattcgttgggcgcgttgggaagggtcgtattcggttggagcgtgttaacgcgttgcgtatcgcgcggggtatcgcgtgtaattttatacggtagttggtttttggtcgtggttatcgtttttagttcgcggggttcgttacgtatacgtggtgcgatttttgtggcgattttatttggggcgtcgtgcgtaaaggtttgtagtgcgcgcgtgagtagtggtttcgcgcgtttacgagagcggaaggggtagttaaggggtagcgtagtcgtcgcgggttaagtcgcggtagagggggtcggcggggatagttttcgaggattaggttcgttattttcgttttatcgttgaagagtgcgcgaaaatggtttattttttgtcgtattttattcgtatttgggttatagatgagtagaggtggttgtttatatgtaaaaatacgttgattttaagttttttatttttaaaatgttttggttttttttgagaaagggtttgtgtttattgttttcggagtttatttttttaggtttgtttttttttaaatatttatgattttttttagaatttttagggtgaagggaaattattatttatgggagggagtttggaaaaatttagaatttttggtgggttttttgtaagtaggagttttgttgagtttttatttagtaaatatttttttttgatttagtgaattagatgttaaaatatgtacgtagttatatatttagtagtttttttgtatttttgggaatcgttagtaagtaaaggttgtttttttttgggtagatattagttggaattattaggggtgtttttatagtttttttcgttagtttggattttatcgtagatttgttgaattaattgttgggagtggattttaggtattagtaaattttaaaaattttttaaattattgtaatatggagtttgggttgagtattattgttttggtttatttaggaatttgtggatggatagtgttttaggtttgtgtgtgtatggagatttttttattcggtataagaggatattataaatttagttggggggagtataaagttgtgatagaatgtaaagaatgaataaggggtcgagcgcggtggtttatgtttgtaattttagtatttcggaaggcggaggcgggtggattatttgaggttaggagtttaagattagtttggttaatatggtgaaattttatgtttattaaaaaataaaaaaaaatgagttaggcgtagtggcgggtgtttgtaattttagttattcgggaggttgaggtgggagaattgtttgaatataggaggcggaggttgtagtgagtcgagatcgtgttattgttttttagttttggcgatagagtgagattttgttttaaaaaaaaaaaaaaaaaaaaaaagaataaggttgggatattgtagcgtttttaaagagaaataaagtagttatggagataagaagtaggatgatttgggtatgtttattagaggtagagataagggagaaattaaagataagtttgggtttttgtttttagtaattgggagtttagtggttatttttgttgtaaagaggaagttgggtaagtgtagtagtgaggttgaagaaaagggaattaaattttggttatgtttatttgaaacgttttttagatattttagtgaaggtattggtacggaggatttagtttgagggtttaggttagtgttttagtcgtggatttggggtagatgaatgtagatagattaggttagtgattaggattgagtttagattttatcgtgagatatggaagttgagttagaatttgtaaaggagttgagtaggagttgtagggggtaggaggaaaattgggagagtgtagtttttgggagttaaagggagtaagttttaaatgatgttgagggggtgagaatggagaatggaatattggattttatttggtagtatatagatcgttgaggattttgtttcgggtagttttttggaggaagaggtaagtttggttggagtgggtagaggggagagtgaaggcgaaggattagagtgtatagagattagtgttttggtttgaggggagtagagataggtgataattatagggtagacgtaggttaaaggtgtttagttttttttttaagtaaatgggtagatgtattttatatacgtttttagtgaagggtcgggtgcggtggtttaagtttgtagttttagtattttggaaggtcgaggcgggtggattatttgagattaggagtttgagattagtttggttaatatggtgaaatttcgtttttattaaaaatataaaaattagttgggtatggtggcgggcgtttgtaattttaggtatttaggaggttgaggtagaagaatcgtttgaatttaggaggcggaggttgcggtgagtcgaaatcgcgttattgtattttagtttgggtgataaaagtaagacgtagttttttgttgttgtttttttaattgttaatgaggaaaggggaagttttgtgttaggcgatagagatttaattgttgagtaggtttttttgtttgtggtttttcggtcggtttttagacgtttaggtggttaatattagagttcgcgtagtagtgtgaggtaatttattgagataggtcgggtttgcggagtttggcgagtagcggttttttttttggggtttttttttaattttcgggatattttttcgatttggagttttttcgttttatcgttaggtttttttgtagattgtaagtttatttgttattatcgttgtcgcgcgttcgtttgtttggattgttgcgggtttcgggatttgggttgggaattcgcggtggagcgggatacgaacgtggtgagcgcggggtcgagggcgtatgggaagggcgaggatgggtaggttatagtgtaggtattttcgagggttgtttgggtgtcgcgcgtaaggagcgttttaattgtcgatttttcggcggtatagagaggttaattttgcgcgggggttgggaggggagtttggattgtcggtttcgtaagtattttattcgttgtaagcggattcgggtttaggttgatttaggtttcgcgtacgcgtatttttcgtattttttcgttttcgttttcggttagaggttatttttgtgcgtttgttcggacgttggtattcgttttcgttttttgtggtaggtggggtttgtgagtggagtttcggagcgatgaggttatttttgggggcgaagcgtgcgtgttttcgtttcggcgtttttgttttaatgagataagagttagatttcggcgatttacgttttagttttaacggttgcggcgcggttttggttcgggcgtacgcgtatattgatacgcgtatacgtacgtacgcgatcggggcggtggttggcggttacggacgcgtaggattgggggacgggcgggtacggttatgggcgaggcggaggcgttttttttcgaaatgatttggagtagtacgacgagtagtggttattgtagttaagaggattcggattcggagttcgagtagtattttatcgcgcgaatttcgttagttcgtaggtcgcgtcgggattaggtgggagttagggggtgtcggcgggcgggaggggaagcggtcgttggagtttcgtttttttcggttcgttgtcgcgttttgggtcggtgggtagttttatttttttggttacgtggtttttcgcgggttttggtcggggatttgttcgcggaatcgtgcgtaagatttcgattttatcgtttagatgttgggtgtcggggtttttttggtttttgttatagataggttgaatacggaaaaagtagttgtatggtttgtggtagatttgagtcgggtattatttagttatgattaaagtcgatcgagtagtttggattagtatttcgattttcgcgttcgaatgtttttgttttttttttggggagattaggggaggatgtggagagggaagagttttcgttaggaattgagaagtatgtttaggaaaatttgagaggtagagagagattttgtttttttatttgtatttttgtatggagttagttgagtttttattttttttttgttttggtttgttattagttgttggaatgtggaagattttgttttttttttttagggtggatttggagaaagatttgggaatagataggaaagaagttttgttttggattataagtatttaggagtattttatttataggaagggggaaagttagattataaaatgtttaaagaggtggaaaaagagatttaggttattaatttaggattgtaaggtgtttcggaattttttaggtatttttattatcggagaattgtgtgttagatgttattggtgtgattattaggtttagagaattaggtttaggtattaggaaaaagaaatagggattgtgaagtttagtatgtttggtagaaatggggcggaaatttttatttaagtaaagaaagtggagttgtgagtgatgttttagataaaattttataaaattttttataaaatgggtggtgtttagtacgttaaaattttagtttagagtttgggtgtaagggttgagttgagtgtagatttttgggtttgtttttatgttagttagttttgagttattttttattgtggaaaggtgggaaaattataagatattaattaattgaaaaggagggttagttacggaggtgtatatttgtaattttagttatttgggagggtgaggtagaaggattatttgaatttgggaggtagaggttgtagtgagttaagatcgtgttattgtattttagtttgagtgatagagtgagattttgttttaaaaatagaaaaggaagttaagtacggtggtttatatttttaatgttaatgttttgggaggttaaggtaggtggattatttgtaattaggaattcgaggttagtttggttaatatggtgaaattttatttttattaaatatataaaaattagtcgggtatggtggtgtgtgattgtagttttagttatttgggagattgaattattttaatcgggaggtaaaggttgtagtgagttaagatcgtgttattgtattttaatttgggtgatagggtgaggttttgttttaaaaaaaagaaagaaggttgggtttggtgatttatgtttgtaattttagtattttgggaggttaaggtaggtagattatttgaggttaagagttcgagatttgttaggttaatatagtaaaatttcgtttgtattgaaaatataaaaaaattatttggttatggtggtgtgtgtttgtaattttagttattggggaggttgaggtaggagtattatttgaatttagaagatagaggttgtagtgagtcgagattgggttattgtattttagtttggatgagagagtaagattttgttttaaaaaaaaaaaaaaaaaaaaagaaagaataggaggttgagaagttttaagttatatgttaaaaaaaaagaaaaaaatattagttttaggttaggtgtagtggtttatatttttaattttagtattttggaaagtcgaggtgggtggattatgaggttaggagtttaagattagtttggttaaaatggtgaaatttcgtttcgattaaaaatataaaaaattagttagttgtggtggtaggtatttgtaattttagttatttgggaggttgaagtagagaattgtttgaatttaggaggtagagattgtaatgagttaagatcgtattattgtattttagtttggaaaatagagcgagattttgttttaaaaaaaaaattattagtttttatggatagtggtagagtggagggtgggtttttatggtgtagaagggaaattttatggttttgttgtgtattcgattgggatggttgttgaaatttttttttagtaggtagttttggaaatagaaaaagaaatttttttttttttagaattttggaagggttgtgtagtgtttttaatttaagtttgttttttgagtgaagatagggaggtttattattagaagggaaggggttggaaatgaggttattgtattttagtttagggtttttgggttatttaggaagggaagaaggagtaagtttttttattgttaggtaggagtttagagttattataagaataagttagtattatttttgtgttttttttgttttgtaaataaaatgatttttttttttgttttggtattagagtttgtttggtattttttttgtttttagtattttttttatttgggtattttttttcgttggtgtattgaataaatatatttattgttttatttatagtttttagtttttattttttagggtttatattatttgtttttattaattcgataaggttgtttattgtttttagtaaggtttgtattggggtttttattttagtgtttttttttatttaggagatttttggatatttggggaagaaaatgagtttaaatttttatttttttttttttattttttttttgtaaggttttggttttagtttttagttttatatttttgttggttgtagaatagtagcgggttttgggtaaggagtattttgttaaaacgttttattttgtttttttatttgttttttttatttgtttttattagatggtttaagtgtttaaggggattttagggcggagttagggagaattttggtttttttgggttaggtataagattattttataggaaattttgtgggaatttttttgggataaagtattggttagcgttgagtttagttgtgtttgtgatattcgtattttaattagggtttatttgacgttaataggaagtaaggttgatgtagtggggttaagggagtttgggagaagaaagtcggtttagagttttggttgttttgttttatattttattttttcggtaagaatttagtttttagatgaggtggggagtgagtggtcgagttaaaaatttttgggtcgggtacgatggtttacgtttgtaattttagtattttgggaggtgaaggtaggcggattatttgaggttaggagtttaagattaatttggttaatgtggtgaaattttatttttattaaaaatataaaaattagtcgggtgttgttgtggtacgcgtttgtagttttagttattcgggagtttgaggtaggagaatcgtttgaatttaggaggtagaatttgtagtgagttaagatttagttattgtattatagtttgggcgatagagtgaggtttcgttttaaaaaaaaaaaaaatttttgggttaaatttttagatagtataggtaggtgtagaaatttattaggaagttgtttgtgtatttttggtagattggagtttggtttaaagttgttttttatgtagtttgggttaaggttaaatattatgttatagtgattttttttattatgtgtgagatatggagaattggttttaagtattattttgtttattggtggttggattattgatgtgtattattttttattttttttattttgtagtgggttatggtttcgtgtcggggtagaggagaaaaatgggttgttttttttaggataaatttttattttaatttaattagggtgttgtgattagaatgtgtaattgaggtgtgattttattgattttttttttttttgagatcgagtttcgtttttgttgtttaggttggagtgcgatggtacgattttagtttattgtaatttttatttttcgagtttgagtaatttttttgttttagttttttaagtagttgggattataggtatgtgttattacgtttggttaattttgtatttttagtagagacggggtttttttatgttggttaggttggttttaaatttttgattttaggtgatttattcgtttcggttttttaaagtgttagaattataggcgtgagttaacgtgtttagtttgtttttgttttttgtgttttgaagtagggttttatttagttttttaggttggagtgtagtgatacgataatagtttattgtagttgtaatttttcgggtttaaacgatttttttattttagttttttgaatagttgggattataggtatattattatatttggttaatttttttttttttttttttagtagagatgaggttttgttatgttgtttaagttggttttaaatttttgaggattaagtgatttttttattttagttttttaaaatgttgggattgtagatgtgagttattatatttagtttgattttattttaaatgagagtttttttttagagttttttagttgtttttggtttttggttatgtgtttttagttgtttttgtttttgtggtatttttaaggttatatttagtgttgaggttttaggtaggtagtagagagaagttaaatgattttgttttttttttatttatttagagtatgtaaaattaggagtagtggtgggtttagggtgggtattagttatgtatatgtatattagggatagggggttaaaggtagttagtttttaaagattgttttagaggttattttttagagaagttttgggttttttaagggttttgtgtttatgttggtttattttgtagg

SEQ ID NO: 256 - DNA, 10224 bp, Artificial Sequence
  chemically treated genomic DNA (Homo sapiens)
tttgtaagatgggttagtatggatatagggtttttgaggaatttagggtttttttgaaaaatggtttttggggtagtttttggaaattgattgtttttggttttttgtttttgatgtatatatatatagttggtgtttattttgaatttattattgtttttggttttgtatgttttgggtggataagggaaagatagaattatttggtttttttttgttgtttgtttagggttttagtattgaatgtagttttaaggatattatagaagtaggggtaattgaaggtatatggttaggggttaggaatagttgagggattttgaagagggatttttatttaaagtaaaattaggttgggtgtggtggtttatatttgtaattttagtattttgggaggttaaggtaggaggattatttgatttttaggagtttgagattagtttgggtaatatagtaagattttatttttattaaaaaaagaaaaaaaaaaattagttaggtgtggtggtgtgtttgtagttttaattgtttaggaggttgaggtgggaggatcgtttgagttcgggagattgtagttatagtaagttattatcgtgttattgtattttagtttggggaattgagtgagattttgttttaaaatataaaaaataaaaataggttgggtacgttggtttacgtttgtaattttagtattttgggaggtcgaggcgggtggattatttgaggttaggagtttgagattagtttgattaatatggagaaatttcgtttttattaaaaatataaaattagttaggcgtggtggtatatgtttgtaattttagttatttaggaggttgaggtaggagaattgtttaaattcgggaggtggaggttgtagtgaattgagatcgtgttatcgtattttagtttgggtaataagagcgaaattcggttttaaaaaaaaaaaaaattagtaaaattatattttaattgtatattttgattatagtattttagttgagttggagtgagggtttgttttggagaaggtagtttattttttttttttgtttcggtacggggttatgatttattgtagggtgagaggagtggagagtggtgtatattagtagtttagttattagtggatagagtagtatttggagttagttttttatgttttatatatagtgagaaaaattattgtgatatgatgtttaattttgatttaagttgtataaaaggtagttttaggttaggttttaatttgttagaggtatataggtagttttttggtgggtttttgtatttgtttgtgttgtttggagatttggtttaaagattttttttttttttgagacgaagttttattttgtcgtttaggttgtagtgtagtggttggattttggtttattgtaagttttgttttttgggtttaagcgatttttttgttttagattttcgagtagttgggattataggcgcgtgttataataatattcggttaatttttgtatttttagtagagatgggattttattatattggttaggttggttttgaatttttgattttaagtgattcgtttgtttttattttttaaagtgttgggattataggcgtgaattatcgtattcgatttagagatttttaattcgattatttattttttattttatttagggattggatttttgtcggaagggtggagtgtgggatagggtagttagggttttgaatcgattttttttttttagatttttttggttttattgtattagttttattttttgttgacgttagataggttttagttagaatgcgagtgttatagatatagttaagtttagcgttgattaatattttgttttagaagaatttttataaggttttttgtagaatgattttgtgtttagtttaggagagttagggttttttttgatttcgttttggagtttttttaagtatttaaattatttgatggggataaatggagaggatagatgagggagtagggtggagcgttttagtagaatgttttttatttagaattcgttgttattttgtagttagtaaggatgtggggttaagaattaaggttagggttttataggaaaaaggtaaagggggaggggtgggaatttaagtttatttttttttttaagtatttaaaggttttttggatggagaagagtattggagtaaaaattttagtataaattttattggggatagtgggtaattttgtcgggttagtaaaaataaatggtgtgggttttggaaaatgagggttggaggttgtgaataaagtagtggatgtgtttgtttagtatattaacgggaagaagtatttagatgggaggagtattaggggtaggagaaatgttagatagattttagtgttagggtaagaaggaagattattttgtttgtagaatagggagggtatagggatggtgttaatttgtttttgtgatggttttgagtttttatttaataatgagaaagtttgtttttttttttttttttggatgatttaggagttttgggttgggatgtagtgattttatttttagtttttttttttttggtgatgaatttttttatttttatttagaaaatagatttggattagaggtattgtatagtttttttaggattttaaaggaggaagagtttttttttttgtttttaaagttgtttgttggaagaggattttaatagttattttagtcggatgtatagtaggattatggaattttttttttgtattatagggatttattttttattttattattgtttataaaaattgatggttttttttttgagatagagtttcgttttgttttttaggttggagtgtagtggtgcgattttggtttattgtaatttttgttttttgggtttaagtaattttttgttttagttttttaagtagttgggattataggtgtttgttattataattggttaattttttgtatttttagtcgagacggggttttattattttggttaggttggttttgaatttttgattttatgatttatttatttcggttttttaaagtgttgggattaaaggtgtgagttattgtatttggtttaaaattgatgtttttttttttttttttaatatataatttgggattttttagttttttattttttttttttttttttttttttttttgagatagagttttgtttttttatttaggttggaatgtagtggtttagtttcgatttattgtaatttttgttttttgggtttaagtgatatttttgttttagtttttttagtagttgggattataggtatatattattatggttagataatttttttgtatttttagtatagacggggttttgttatgttggtttggtaggtttcgaatttttggttttaagtgatttgtttgttttggttttttaaaatgttgagattataggtatgagttattaagtttagtttttttttttttttttgagatagagttttattttgttatttaggttggagtgtagtggtacgattttggtttattgtaatttttgtttttcggttgaagtgatttagttttttaagtagttgggattatagttatatattattatgttcggttaatttttgtatgtttagtagagatagggttttattatgttggttaggttgatttcgaatttttgattgtaaatgatttatttgttttggttttttaaagtattggtattagaggtgtgagttatcgtatttggtttttttttttatttttgagatagagttttattttgttatttaggttggagtgtagtggtacgattttggtttattgtaatttttgttttttaggtttaagtgatttttttgttttatttttttaagtagttgggattataggtgtgtattttcgtggttagtttttttttttaattggttagtgttttgtggtttttttatttttttatagtggaaaatggtttaggattgattgatatgaagataagtttaggggtttatatttaatttaatttttgtatttaagttttgggttaagattttggcgtgttgagtattatttattttgtaaggaattttgtaaaattttatttgaagtattatttataattttattttttttatttaaataaggattttcgttttatttttgttaggtatattgagttttatagtttttgttttttttttttggtgtttaggtttggttttttgagtttggtggttatattaatggtatttggtatatagtttttcgataatggggatatttaggaggtttcgagatattttatagttttgggttagtaatttggatttttttttttatttttttaggtattttataatttagttttttttttttttgtgggtaaagtgtttttgaatgtttatggtttaaaataagattttttttttatttatttttaaatttttttttagatttattttagaggaagggaatagaattttttatattttagtagttggtgataggttagaatagggaagaggtgagggtttagttggttttatataggagtgtagatggaggagtaggatttttttttgttttttaagtttttttaaatatattttttaatttttggcgaggatttttttttttttatatttttttttagtttttttaaggagggagtaggagtattcgaacgcggaaatcgaggtgttagtttaaattgttcggtcggttttagttatagttggataatgttcggtttaggtttattataagttatatagttgtttttttcgtgtttaatttgtttgtgatagaaattaagggggtttcggtatttagtatttaggcggtggaatcggggttttacgtacggtttcgcgggtaggttttcggttaggattcgcggggagttacgtagttaggagggtggggttgtttatcgatttaggacgcggtaacggatcggggagggcggagttttagcgatcgttttttttttcgttcgtcggtattttttggtttttatttggtttcggcgcggtttgcgagttagcgaggttcgcgcggtgaagtattgttcgagtttcgagttcgagtttttttggttgtagtagttattgttcgtcgtgttgttttaggttatttcgaaagaaggcgttttcgtttcgtttatagtcgtattcgttcgttttttagttttgcgcgttcgtagtcgttaattatcgtttcggtcgcgtgcgtgcgtgtacgcgtgttagtgtgcgcgtgcgttcgggttagagtcgcgtcgtaatcgttaagattgaaacgtagatcgtcgggatttagtttttgttttattggggtaggaacgtcggggcggggatacgtacgtttcgtttttaggaatgattttatcgtttcggagttttatttatagattttatttattatagggaacgggggcgggtgttagcgttcgggtaagcgtataagagtggtttttggtcggaggcgagggcgggaaggtgcgggaagtgcgcgtgcgcggagtttgggttagtttgggttcgggttcgtttgtagcgggtggagtatttgcggagtcggtaatttaggttttttttttagttttcgcgtagaattagtttttttgtgtcgtcgggaaatcggtaattagaacgttttttgcgcgcggtatttaggtagttttcgagaatgtttgtattgtggtttgtttattttcgttttttttatacgttttcggtttcgcgtttattacgttcgtgtttcgttttatcgcgggtttttagtttaggtttcggggttcgtaatagtttaggtagacgagcgcgcggtagcggtagtggtaggtgaatttgtaatttgtagagaggtttggcggtgaggcggaggagttttaggtcggggaaatgtttcggagattgaagggaagttttagggagagggtcgttgttcgttaggtttcgtaggttcgatttattttagtgggttattttatattgttacgcggattttaatgttggttatttgggcgtttggaaatcggtcggaaggttataggtagagaggtttgtttaatagttggatttttatcgtttagtatagaattttttttttttttattggtaattaaaaaaataataataaaaaattgcgttttgtttttgttatttaggttggagtgtaatggcgcgatttcggtttatcgtaattttcgttttttgggtttaagcgatttttttgttttagttttttgagtatttaggattataggcgttcgttattatgtttagttaatttttgtatttttagtagagacggggttttattatgttagttaggttggttttaaatttttgattttaggtgatttattcgtttcggttttttaaagtgttgggattataggtttgagttatcgtattcggttttttattgggaacgtatatggaatatatttgtttatttatttgaaggaaaaattaaatatttttaatttacgtttgttttgtggttgttatttgtttttattttttttagattaagatattggtttttatatattttaatttttcgtttttatttttttttttatttattttagttaggtttgtttttttttttaggaaattgttcgggatagggtttttagcgatttgtgtattattaaatggaatttagtgttttattttttatttttatttttttagtattatttgaagtttgttttttttgatttttaggggttatatttttttagttttttttttattttttgtagtttttgtttagtttttttgtagattttgatttaatttttatattttacgatgaagtttgggtttagttttgattattggtttggtttgtttatatttatttgttttagatttacggttgaaatattgatttaaatttttagattagatttttcgtgttagtatttttattaggatgtttaaaagacgttttaagtgaatatggttaaaatttaatttttttttttttagttttattgttatatttgtttagttttttttttgtagtaaaaatggttattaggtttttagttattggagataaaagtttaaatttatttttgattttttttttgtttttatttttgataaatatgtttaaattattttgttttttatttttatggttattttatttttttttgagaacgttgtaatgttttagttttgttttttttttttttttttttttttttgagatagagttttattttgtcgttaaggttggagggtagtggtacgatttcggtttattgtaattttcgttttttgtgtttaagtaatttttttattttagtttttcgagtagttgggattataggtattcgttattacgtttggtttatttttttttattttttagtagatatgaggttttattatgttggttaggttggttttgaatttttgattttaggtgatttattcgttttcgtttttcgaagtgttgggattataggtatgagttatcgcgttcggttttttgtttattttttgtattttgttataattttgtgttttttttagttgaatttgtgatgtttttttgtatcggatgagagggtttttatgtatatatagatttgggatattatttatttataagtttttaaataggttagagtagtgatgtttaatttagattttatgttataataatttggggagtttttaaaatttattgatgtttagggtttatttttagtagttgatttaataggtttgcggtgggatttaggttagcggggaggattgtaaaagtatttttggtgattttagttggtgtttatttaggggagagtaatttttgtttgttggcgatttttaggggtgtagaaggattgttgggtgtgtggttgcgtgtatattttagtatttgatttattgggttagaaaagggtgtttgttaaataaagatttaataaaatttttgtttgtagggggtttattaaaggttttaaatttttttaggtttttttttataggtggtaatttttttttattttaaaggttttggagggggttatgagtgtttgagaagaggtaagtttgggaagatggatttcgaggatagtaggtataaatttttttttaagaagggttaaggtattttaaagataagaaatttaaaattagcgtatttttatatataagtagttatttttgtttatttgtggtttagatacgagtggagtgcgataagggataaattattttcgcgtattttttagcgatggggcgaaagtaacggatttagttttcgggagttgttttcgtcgattttttttgtcgcgatttgattcgcggcgattgcgttgttttttggttgtttttttcgttttcgtaggcgcgcggggttattatttacgcgcgtattgtaggtttttgcgtacgacgttttagatgaagtcgttatagaggtcgtattacgtgtgcgtggcgggtttcgcgggttggaagcggtggttacggttagggattagttgtcgtgtggggttgtacgcggtgtttcgcgcgatgcgtagcgcgttggtacgttttagtcgggtgcggttttttttagcgcgtttagcgggtgttagttttcgtagtttaatgagtttaggttttttcgatatggttcggttgggttcgtgtttcgttggttttgggcgttagtaagcgcgggtcgggcggggttatagggcgggtttcgattttagcgttttttttaggatttagattgggcggcgggaaggagttgaggagagtcgcgtaatggaaatttgggtgtagggattgtggggttcgaaggcggggttgggcgcgttttcgtagagtttttttcgttttgtttttttttttttttttcgttttttttttatattttatttcggacggttataacgacggcgatcgtaaagtattacgcggagatattcgtgtttttggaggttagttttattgtgttagaggaagagggtttttatattcggttttggtttttttggttcggtttgttgaagtaatatatttggtttatttattgggtggggtaggaagtttcgagtttttatttggggtgaggaggagggagatcggttagtagttttatcgttcgttttgttttttattgcggagattggggtttcggtagaggttggatcgtgattttgaggtttaggggtgtattttgggtggatttttttggtatgggtggtcggtttttagtaattgtagtttttatttggttttgttattttgggttgttaggatataagtttttttatgttttttttagtgtttgatttggtattttttgtaggtaggtgggtattgaggatggtaatgtatgtgggggatgtgggagtagggtttagaggtttaaggttttaggatatttttatttgtagtaatattatttattttggtatcgtgagtagcgtttagaagtttttgtattgtagtaagtatagcggggtcgttttggagttattgtttttagtatatttagtttgtaggttttagtttatttgggggaaagttaggaaggtttgattggttttggaaggtgggggtattttatttatatttatgttttttgtattttttttattttttttgttatttttataggttttattttcgcgtttgtagtcgtaggttttgttttgaggggttgaatatatgttggagttggtgtttggtaattgtttgttatttgtttttgttttttcgttttagtcgtttttagatttttgggatttaggagagagaagtggagagtggtaggaaggtgttggtaaagtgggatagtggttttgagtagttaattttttagtgtttatttgttttaatattaggttttttttaggaggttgggttttagttagggttagatgggttaggaaattttgtaagtgggttaggttgggtagttggtttagtagtgtgtttgtgaggaaggttcgaagttgtaagggtgtttagtggaggttagtgtgatgtaggtgttggttagggggttaaggaaaaggaaggggttgggttgggttgagaatgtttgtgggggtttatgttttattagttggtgtgttatttgaggtttaaggattgaaaagagtattggggttgaggtgggtgggtaaagataaatagtagggacgtagtcggggtaggatggggagggcggtattggggttgtgggggtt

SEQ ID NO: 257 - DNA, 11787 bp, Artificial Sequence
  chemically treated genomic DNA (Homo sapiens)
tgtgaaatattagttatgaagaaattttgataataatattttagtgtagaattgtatattagtaatagtatgtttggatttttttagatatgtggtattaatatatgtttggaattttaagtgttagattaagaagaaaaatttaagatataaagtggtgttttaataatttgagttttattatttttaatgttaagaaattattatatatataaattttatgtttgtaattttagatttattgttgtataggatttttggtaattataagttagttgtattaagtaaattttgatttatttggttggtggttttgtgaacgataattatttttaggcgggtttaatggaaggtcggagaaggtattgtttgataagttatattttgttagttttagaattttgagtgaatgttgttgttttgttttgtttgtttttatattgtaaattggttatgagtttatttattatttttttttgttgtgaatttttagtaatatattttattaaaagattttttttgataaagtagatttttatgagttgaaatatttattgattttaatgtttatttttagatagttttgtataggaatttttatgtttaaggatagttgattttggtaaattggattttttaaaaattagattatagaatttttgtttgtaatttttttatttaaggaatatttagataatttggtttggagagaagattattaaatttttttttatataataggttttttttattaggtttgtaagggataaatagtgaatatttatttgtaattatgtaattgttttgtagagtaagtgtagttataagtggtaagaaatgaatgagtatggttgtgttttaattataattattatggatggatatatttgtattttttatgttagatggaattttgttttgttgtttaggttggagtgtagtgacgttattttgatttattgtaattttcgttttttaggtttaagtagttttgttttagttttttaagtagttgggattataggcgtacggttaatttttgtatttttattagagacggggttttattatattggttaggttggttttaaatttttgatttcgtgatttgtttgtattaattttttaaagtgttgggattgtaggcgtgagttatcgtgtttgatttaggattatatttaaatgatttataaatgtaaaaattatttttatattatagatttgatttaaggattgtagtttgttgtgtttttgttttttgaatgggacgtggtggtatagtagttgggattatagttatatattattacgtttatttaattttgtatttttagtagagatggggtattattatgtttattaggttgattttgaatttttgattttaggtgatttattcgttttaattttttaaagtgttgggattataggcgtgagttattgtgttcggtttgtatttttatttttaaattttagtatttttgaataataacgggtagagaaatattcgtagtagttgtttataatagagtgaaataaaaagtttgaggaattgttaatagaaaaatgggtggtcgtggggagtatcgggatttgtatttgtatataatttagggtagtttttaatgagtttatgagttatttagggattttattaaaatgagattagttttgagtggggttttttttatagatttttgttattatattttgaagagtaagggtttagttgattttaagtaggtgtgtatttttttggatagtgtttgtagaaaaatagaattatatttatggattttatgattatattgttagttttttggttaaggggttgagttaggtatttattgtagatagaaataaagtagatgtatgtttattagtgagtattgagatatttagtatggttatttatgaattgaagtttggtttttttttatttattaattgattattttttattttaagtaagtattttatattttgtatattagtatatttttggatttcgtttttttatatggtttgatattttgaatattagattatttaagagtgagatttaatttatttttaaattgtttttaaaattagggaaataaaagagaatgaaattgtggtaattttttttttttttagttattagatgtatgttatttatggtgggttttggtttttttaaagataattggaagattttattggattgatagagagaaattgcgtaattttattttagtatgttaagatgaagaaacggggggatttgtagataggttaggagatatggtaagtaatatttttgatatatttttataaattattttagcgtttgtattattttatggttttatggatttttagggtggtatttcgagtgttgttttgaaagtagtttttttttttatttattgtagagtgtatgaaggatatagaataattttatagaaattttttgtcgtttgttgttaataaaattagtatatggtaaaggttaggtatttataatttgaagttaaagaagtttttattttgtgatttgtatataaatttttttttaaataggtggattttttttatattttatttggaattgttggattgttatttttgggagaagaatagattaaatttgttaattttgttttttgtatgtttgaagaagtgttttagagagtgaatgtttagtttgagttagtgagttagatttattgaattgaaagttgtatagtatagttttgttattttaatatttttgtatttgaagtgtttatcgaatttaaaagtgattattgttaatattttgtatattgtgttaaattaattttaataaattatataattatatatattgtaaaataaagatcggtattttattttttgttttttattttgaagttttgttattttgattatagttttttgtgtatatttttgtgtttgttatgtttaataattgagttaatataaaataattttaggtttttatttgattttttttttatgtatattttttatttgttttatagtaagttgatgtaaattggtttgttaataagaatgttaattgatgaaagtggatagaatttatatatgaattaaatgatgtataaaataaatggttgttgaaatttggaaatgattgataggtttgaatatggttattttgaattggttatagatttaggttaaatggtaatttattattttaaaatggggttgtgattcggattgttttttttttttttttttttttttttttttttagtattttatatattagaattatttaaagaaggagttgtttttaaataaggaaatattaacgggtaagttgatggttattatagtatttttttgtatttgttttttttttaaaaagttaaaatgggtataattatttttttttatttttttgtgatagaatttttgttgtttaggttggagcgtagtagtacgattttagtttaattgtaattttcgtttgtcgggtttaagtaatttagtcgtagtttttcgagtagttgggattatagtcgtatattattatgttcggttaatttttatgttattttagtatagatagggttttattatgttgaggagttggagattagtttgattttgtgatttatttatttcggttttttaaagtgttgggattataggcgtgagttattacgtttggtttaaaatgagtataattattttaggggtttatagttttggtgaaagtgaggtattttttatttttaaattttattttttagagatagggttttttttttttttttaggttggggtatagtagtgtaattatagtttattgtaattttaaatttttgggtttaagtagtttttttattttagttttttgagtattagggtttataggtatttgttattatgtttattatgtttagttgattttttaattttggggataggtattgttttttttaggttggttttcggaggtgaagtaattttttggttttagttttttaaagtattgggattatagggaggagttatcgtgttcgatttgaaaataaggttttttgatggaaattgagattttttttaagtatgtttggaatgttttgtgtaataattattttaagaatagagatgtttttaaggattgttgttattgtatgtgggtaaatcgttgtgtataattggtttattgagatatttaatagtggtaggattttagtagtggtgtaaattaatgttttttaatagtttttgtatggtagtatttagataatttcgttatgtttaatttatggatttttggtaagttggtattattggttttatttaaggaattttttaaaggttattattgtaaagttggagtttgaatttttagtgtgttattaattgatttatatgttagaaattatagtattagaaattggtagatggggaattgttaattgagagattttatttagttagtttttttttgttttttattttattatgtatatagttatgtgtatattattttttgataatataattattttttttatatttggttataagattaattttaggtgggttatgttgtgtgagtattatacgtttttattgtgttaaaggtattgggtgtattgtgttgggtggtttttatatttaaagataagttagtgtgtttggacgtgtgggaaatgtatgtaatatttgtaataagggagattgggtgttgtgagaataatggggttaataaatcgggtggttattgatgggttttgtagagttttggttagtttgatatttgtaggttgaggatgttttagtgaggtttatgtggaaagtgatgggtttgggaatggttggaagtagggttatagatttgaagtacgtgaatttatgtggaaagttgagtttgtttgcgtttgcgtagtgtagtttagtgcgtcggcgcgtagttttttcgttcgttttagcggcgtagtttttgtagttgggttattggaggggtcgtttagaaattttatatttttcgggttagggaaggtttgggaggatgttgaggtttgagattttattaatttcgttttttgtttcggcggttttttcgtcgtcgggagaaattcgtttattttagggttttcgttataatttcggattttaggagattttatagagtcgtttttcggtttaggtggtttttgtatttatttgttttggtacgttaggagttgcgggcgatcggagtagtagtagtagtagttttttttgtttcgcgttaaattttcggttagtttaaggtaaggagtgattgggtggaggagtttttttgaggttagaggtcggtagtttatggaggttcgggggtacgtgggtggtggttattatagtgaagttgtgatttggttggggcgtgagatttgagtgttttgggaatttggtgagtttgggtgattagaagttttgattttttaaattggttttattgtaagattttgattgtggatggtttagttttgagaaaggttgaagtattttatataacgttttttatagtgtttgataaatgatagtttgtgcgtgagtttgttgatagaagttgtgagttgatttttggttgttgaatttaattttttaaattttgttaaggtgggataaaatagattaaattgaatattttatttaatttagggaaaataatatgtttagtattaaaagagtgggttgggcggtggttgacgtttgtaattttagtattttgggaaattagggtgggcggattatttgaggtcgggagttttatattagtttggttaatatggtgaattttttatttttattttttatttttattaaaagtataaaaattatttgggtgtggtggtacgtgattgtggttttagttatttaggaggttgaggtgggaggatggcgagttcgggaggtcgaggttgtcgtgagttgagattgcgttattgtattttagtttgggtgatatagtgagattttgatttaaaataaataaataaaaaagatgtatgttttttaaattatttattattttgttagtttttatttatgataaagtattattattttttatatacgattgtaatataatggtaaagtaataaatattaaatttaatggttattttttagtttattttatgtgatttttttgttgtatttaatgtttttaatttttttatttttagaaatagagtttcgttatgttgtttatgttggttttaaatttttggttttaagtgtttttgtttcggtttgtttaagtattgggattataggtatgagttattgttgtttggtttatgtttaatgtttttgattggtttttttttaaatttttttaatttggtttttttgattttatttgtttttgtttttttgttattttttagagaattgttgtgtttatttttgtttttaaattatgggtatgttattaaagtttttttttttaggttatttttatttagatgtgattatttttatagtttagattttatttatattttagatttattttagattgttttttgaagtttttattgatggattaatggatattttaggttgattatatgattaattaaatttttttttgtattttttttttttttttgagatagagttttgttttgttgtttaggttggagtgtagtggtatggttatgatttattgtagttttaaatttttgggtttaagcgatttttttattttagtttttcgagtagttgggattaaggtatgtgtttttatagatggttaatttaaaaaatttttttgtagagatagtgtttttttacgttgtttagtttggtttcgaatttttaggtttaagcgatttttttattttagttttttaaaatgttgggattataggtgtgagttattgtatttagtttttaaatttttaagtgtttttttatttttgtagtttatttattgtattattagagttatgtggaaaatgattttattatgttttttgttatttaaattagtagatttgtatttgtaggtaaaagattaaattttttagaaggatagttaaagtaattgggatcggtttttaatttttatagatttattttttattatttaatatttattttgttttttaataaaattgagttatttgtaatttttttaaagtaatatgaatgtttatattgttagtttaatttttttttttattagatgtttggttatttatttatttattagtaatgataatatttattaatttatatgtatttattttgttttggttttttattaggtagacggtatttttgatttttataataattttgtagagtagattttttttttgtttttgttttatagatagaattaaggtttaaataggcgaataaaggtttaaattatgttagtagttggggataataatttgtgtttttaatgaatttaaggtttagtagagaagatagatttaaaaattaataaatatatatttaagaaataattgtatttgaggtatttataatttttgaggtaggtataattaaagtatggggataaaagtgggaaaagatattttatagagtaagtgtattttgaattggtttttaagaataagtaggaagaagaatgttagttaaagggaaatagttggagcgtatttttgagaaaaatacgtgtaaaggtatagaagaattatgtaaaattgttaataattttgtttggttagagtaggagagtgatttaggtagataaatttgaatgtagatatagttgtgagaattagatttgggagataaatttaatttagagattttttatatttaatattaggtttttggttttggtgattggatagatggtagtagtattttttgattttgggaattttgtaggtaaagtaaattttagagggaagatgatgagttttgttatggatatgttgagtgtgaaaagtttgtgggatatttatatatttatattaagataattgaatataggaaattagagttaagaagagagaaatttgagggaaatatggatttgaaagttattagtatgttgggattatagtagagaatatgaagattatatagtaaaatagaggttaaggaagtaggaggagaattaagataagtgaatgagttttaagaaagggtatatagtttaaaagtagtttgagaataagaaatagttttttttatttttagttttcgtatttttagtttttggtaattatttttttttttagttttttaaagtttagaaatgttaatggagtatattttatgttggttttatatacgtttttatgatagtatttttatattttgtttatatttttgtaaatattttttttattaaattattttagtttgagtatattattgatttttgttggaatttatataatgaagttatattttattttatggtgagtatggggagatatataggaattgtaagaaagagagatattgattagatttgttttttagaaagattattggtgatgattcgaagaatagattagagaggtgtaatattggaagtaaggagaagaagaagtaggaaatttgtataaggattaaagaagatataggtttaaaatgggttgggaggagtagagagggatttaaattttagtgatgttaaaaaaaaagaattttagtatttagttattgagtgttagggttgatgaaggaagaattgagaatgttttttaagtttatgatttgagtgataagggataagttggtataattaattatattggtaataaagaattaattttgagggaaagatagagtttatttttggatatttagaatgttgggaagatatttaaaggtttatgtttaagagatagatatagtgatttggagttatattgtttgatagaatattttgtgataatagaaacgttttatatttatgttgttcgatgtggtaattagtagtcgtatgtggtttttgagtatttgaaaatgttgttagtgtgattgaggaatagaatttaaattgtatttaattttgatttagttaaatatttatatatgttgttttattgaataatgtaggtatagagttgagaacggtttttgtatttttgaaggattaaagaattaagaatattttgtgatattaaaattatatgaaatttagaatttaatatgtagaaataaagttatttttaattgaaatatagttatttttatttatttatgtattatttatgattgtttttttatgatagtgttagagttgagtaattgtgatagtgattatatggtttataaaagtttaaaatatttgttatttggttttttatttaaaagtttatgggttgggtatgatggtttatgtttataattttagtattttgggaggttgaggtgggtagattatttgaggttaggagtttatgattagtttggttaatatgataaaattttgtttttattaaaaatataaaaaaaaaatagttaggtgtggtgggtatgtttataatgttagttgtttgggaggttgaggtaggaggattgtttgaatttgggaggtagaggttgtagtgagttgagattgcgttattgtattttagtttgggtaataagagtgaaattttattttaaaaaaaaaaaaaaaaagtttatgttgaggtatggtggtttatgtttgtaattttagtgttttgggaggttgaagtgggaggattgtttgaggttaggtgtttgagattagtttgggtaatgtagtaagattttgtttttataaaaaaaaaattagttgtgtgtggtgaggtgtatttatagtttatagttatttaagaggttgaagtaggaggttatttgagtttatgagtttgaggttgtagtgagttgtgattatattattgtattttagtttgggcgataaagagagattttgtttttataagatagtaaaatagattgggtatggtggttttcgattataattttagtattttgggaggttgagatgggaagattatttgagtttaggagtttgagattagtttgggtaatatggtaaaattttatttttataaaaatataaaaaattagtttggtatggtggtatgagtttatagttttagttattcgggagggtgaggtaggaggattgtttgagtttaggagtttaaggttgtatttagttaagattatattattgaattttagtttaagttatagaacgagagttttatatatagataaaaaggaaaaattaaaagtttagtaatttttggtttatagtttaaggagtcgttatagttatatacgaaggtttgagagttgttagaaaatagatgttaatagaaataaagaggagagatgagatgtttggagatgtataatgttgatttgtgagggaaagtttaaaagtatgaagttttggaggttaatagttaagaagtagaggaaaaaggagatggtaaaggaaattaaaagtggtttaaagagaatttaagatagagagttgtggaaattaaagagaataggtgaatagagtttaaatattttaaaatttttttagaatttttatgtgttaagaggttatgttaggttgtttatgtatattatttaaaaattttatgataattttgtaaaataggtaatagtttatattagtagataagtatttaaataaggaattgaagttaattgagtttaaaatgttatttgtataggggagagaaatttaatgaagaaattaatagaagaaggttaaaagaggtttaataattattatataaatgaaatatatgttttagtttgtattttgttgtttttaaaagaatatttgaaattgggtgattattaagaaagaaaatatattttttggaagtttggaggttgggaagtttaaggttaaaggaggtatatttagtgagggtttttgtgttggtggagtttttgtagagttttgtagtggtatagggtattatatggagagggagttgagtatggtagtttaggttttttattttttttttataaaattattagttttattttcgtgataatttattaatttattaaattatgaatggattaatttatttatgaaggtagagtttttatgttttattattttttaaaggttttatttttgttttgttatattttattggggattaaattttaatgtaagtttcggaggggatagatatttatattttagtaatatatttggtatatttgaagattaaagggtaatttatgattttagttagagtagttgtagtgaatttgtagaggtaaaagttatattagtatatttttgtatatttattaataatgttattaattttgttataatttgtttatttttaaaaattatttttatatgaaattttatagaaagtgaatatagtggttgggtgcggtgatttaggtttttaattttagtattttgggaggtcgaggtaggtagattatgaggttaggaattcgagattagtttagttaatatggtgaaattttatttttattaaaaatataaaaatttattaggcgtggtggcgggtgtttgtaattttagttattcgggaggttgaggtaggaggattatttgaatttgggaggtggacgttgtagtgagtcgagattatgttattacgttttagtttgggcgataagagtaagattttgttttaaaaaagaaaaaaagaaaaaaaaggaaagtgaatatggtataaattataatgattaatatattattgtataatttaaatttttaagaattgattgttaattttttaaatttagg

SEQ ID NO: 258 - DNA, 11787 bp, Artificial Sequence
  chemically treated genomic DNA (Homo sapiens)
tttaaatttgaaaaattaatagttaatttttaaagatttgaattatgtaatgatgtattagttattataatttatattatgtttatttttttttttttttttttttttttttttgagatagagttttgtttttgtcgtttaggttggagcgtagtggtatgatttcggtttattgtaacgtttattttttaagtttaagtgatttttttgttttagtttttcgagtagttgggattataggtattcgttattacgtttggtgaatttttgtatttttagtagagatggggttttattatgttggttgggttggtttcgaatttttgattttatgatttgtttgtttcggttttttaaagtgttgggattagaggtttgagttatcgtatttaattattatgtttattttttataaaattttatgtgaaaatgatttttgaaaataaatagattataataaaattaatgatattattgataaatatataaaaatatgttaatatagtttttgtttttataagtttattgtaattattttggttaaaattataaattattttttaatttttaaatatattagatgtgttgttaaggtatgaatatttgtttttttcgaaatttatattgaaatttaatttttagtgaagtgtggtaggatagaggtggggtttttaagaggtgatggggtatgagggttttgtttttatgaatgaattaatttatttatgatttaataggttaatgggttattacgagagtaggattggtggttttataagaagaggatgagagatttgagttattatgtttagttttttttttatgtgatgttttgtattattataggattttatagagattttattagtataaagatttttattaaatgtgttttttttgattttggattttttagtttttagatttttaagaaatatgtttttttttttgataattatttagttttaagtatttttttaaaagtaatagaatatagattaagatatatgttttatttgtataataattattagattttttttaatttttttttgttaatttttttattgaattttttttttttatgtaaatggtattttagatttaattggttttagttttttatttaggtatttatttattgatgtaagttattatttattttataggattgttataaaatttttaaataatgtatataaataatttagtatagttttttggtatatagaagttttaaaaaaattttaaaatgtttgggttttgtttatttattttttttgatttttataattttttattttgaattttttttaaattatttttagttttttttgttatttttttttttttttgttttttaattgttggtttttagggttttatatttttaagtttttttttataaattaatattatgtatttttaggtattttattttttttttttgtttttattaatatttattttttgataatttttaagttttcgtatatagttgtaacgattttttaaattgtaaattaggggttgttaaatttttaattttttttttttgtttgtatgtgagattttcgttttgtagtttaggttggaatttagtggtgtgattttggttaaatgtagttttgaatttttgggtttaagtaatttttttattttattttttcgagtagttgggattataggtttatgttattatgttaggttaattttttgtatttttgtagagatggggttttgttatgttgtttaggttggttttaaatttttgggtttaagtgatttttttattttagttttttaaaatgttgggattataatcgggagttattatgtttagtttattttattgttttataaagataaggtttttttttgtcgtttagattggagtgtagtagtgtgattatagtttattgtagttttaagtttatgggtttaagtaattttttgttttagttttttgagtaattatggattataggtgtattttattatatatagttaattttttttttatagagatagggttttgttatattgtttaggttgattttaaatatttggttttaagtaatttttttattttagttttttaaagtattgagattataagtataagttattatgttttagtataaattttttttttttttttttgagatggagttttatttttgttgtttaggttagagtgtaatggcgtaattttagtttattgtagtttttgttttttaggtttaagtaatttttttgttttagttttttaagtagttggtattataggtatgtttattatatttggttattttttttttgtatttttaatagagatagggttttgttatgttggttagattggttatgaatttttggttttaggtgatttgtttattttagttttttaaagtgttgggattataggtatgagttattatgtttagtttataaatttttaaataaaggattagatggtaaatattttaggtttttgtgggttatataattattgttataattatttagttttgatattattatagaaaagtagttatagataatatataaataaatgagaatggttatgttttaattaaaaatggttttatttttatatattgaattttaaattttatataattttaatattataaaatatttttgattttttaattttttaaaagtgtaaaaatcgtttttagttttatatttgtattgtttaataaagtagtatatgtgagtatttaattaaattaaaattaaatataatttaaattttgttttttagttatattagtaatatttttaaatgtttaaaagttatatacggttattagttattatatcggatagtataagtatgaaacgtttttattattatagaatattttattagataatgtagttttaggttattatatttattttttgggtataaatttttaggtatttttttagtattttaaatgtttaaaagtgaattttattttttttttaaaattaattttttattattagtatggttaattgtattagtttgttttttgttatttaagttataagtttaggagatatttttaattttttttttattaattttaatatttagtgattgagtgttagaattttttttttttaatattattaaaatttaaatttttttttattttttttagtttattttaagtttgtattttttttggtttttgtgtaagttttttatttttttttttttttgtttttagtattatatttttttaatttatttttcgaattattattaataatttttttgaaaagtaaatttgattagtattttttttttttataatttttatgtgtttttttatatttattatagggtaaaatataattttattatatgggttttagtaggaattaatgatatatttaaattgggataatttgataaagagaatatttataaaggtgtggatagggtgtaggggtgttattataaagacgtgtgtagaattagtataaaatgtgttttattagtatttttaggttttagggagttaaggaagagagtggttgttagaaattggagatgcggaaattggagatggagagggttgttttttgtttttagattatttttagattatatatttttttttgaaatttatttatttgttttaattttttttttatttttttgatttttattttgttatatagtttttatattttttgttgtggttttaatatattggtaatttttaaatttatattttttttaagtttttttttttttagttttagttttttatatttaattattttaatataaatatatggatattttataggttttttatatttagtatgtttataatagagtttattattttttttttaaaatttgttttgtttataaaatttttagaattagaaaatattattattatttatttagttattaaaattagagatttggtgttgaatatggggggtttttgggttaaatttgttttttagatttaatttttataattatatttatatttaagtttatttatttagattatttttttgttttagttaagtaaaattattagtagttttatatgatttttttgtgtttttgtacgtgttttttttaagaatgcgttttagttgtttttttttggttggtatttttttttttatttatttttgaagattagtttaaggtgtatttattttgtgaaatgtttttttttatttttgtttttatattttaattatatttattttaaaaattataaatattttaaatatagttattttttaaatgtgtatttgttgatttttaagtttgttttttttattgaattttaagtttattgagagtatagattattatttttagttgttaatataatttgaatttttgttcgtttatttgggttttggttttatttgtaaaataggaataaaaaaaaaatttattttgtaaaattattgtgaggattaaagatatcgtttgtttagtaagaagttagaataaagtaggtgtatataaattagtgaatgttattattattgataaataagtgggtgattaagtatttgatgaagagagggattagattgataatgtgaatatttatgttgttttaaaggaattgtaagtagtttagttttgttagaaagtagggtaaatattaaatgatgagggataaatttgtaaagattagaaatcgattttaattgttttggttatttttttagagagtttgattttttatttgtagatataggtttattgatttaagtggtaagggatatgataagattattttttatataattttggtggtatagtaagtaagttataaggatggaagaatatttaagagtttgagggttaggtgtagtggtttatatttgtaattttagtattttgggaggttgaggtaggaggatcgtttgagtttagaagttcgagattaggttgggtaacgtaggaaaatattgtttttataaaaaaattttttaaattagttatttgtaggggtatatgttttggttttagttattcgggaggttgaggtgggaggatcgtttgagtttaggaatttgaggttgtagtgagttatgattatgttattgtattttagtttgggtaatagagtaagattttgttttaaaaaaaaaaaaaaagtgtagagaggaatttaattaattatatagttagtttgaggtatttattagtttattaataaaaattttagaagatagtttgaagtaagtttggagtgtagatgagatttgagttgtggagatagttatatttaggtagaagtggtttaggaaaaaaagttttaatgatatgtttataatttgggaataaaggtgggtatagtaattttttgggaggtagtagaaaaataggggtaagtggaattaaggaagttaaattaaaagagtttaagagaagattagttaagaatattaaatataggttaggtagtagtggtttatgtttgtaattttaatgtttgggtagatcgaggtaggagtatttgagattaggagtttgagattagtatgggtagtatagcgagattttgtttttaaaaataaagaaattaagaatattaaatatagtagaaaggttatatgagatgaattgaaaaatgattattggatttggtatttgttattttattattgtgttgtaatcgtgtgtgaaaaatggtgatgttttgttatgaatagagattaataaaataataaatgatttgaaggatatgtattttttttgtttgtttgttttgagttagggttttattgtgttatttaggttgaaatgtagtggcgtaattttagtttacggtagtttcgatttttcggattcgttatttttttattttaattttttgagtagttgggattatagttacgtgttattatatttagataatttttgtatttttagtagagataggggatgggggtgggaggtttattatgttggttaggttggtgtggaattttcggttttaagtgattcgtttattttggttttttaaagtgttgggattataggcgttagttatcgtttagtttatttttttaatattaaatatattattttttttgaattagatgaaatgtttaatttaatttattttattttattttagtaggatttggagaattaaatttagtagttaaagattagtttataatttttattagtaaatttacgtataaattgttatttgttagatattgtgagggacgttatatgggatattttagttttttttagaattgagttatttatagttaaggttttgtaatagaattaatttgaaaagttaaggtttttaattatttagatttattaaatttttagggtatttagattttacgttttaattaaattataattttattgtggtaattattatttacgtgttttcgagtttttatgaattgtcggtttttagttttaaggagatttttttatttaattattttttgttttgagttggtcgggagtttggcgcggggtagggaaggttgttgttgttgttgtttcggtcgttcgtagtttttgacgtgttaggataggtggatgtagagattatttggatcgaagggcggttttgtggagttttttggagttcgaaattgtagcggggattttgaggtgagcgggtttttttcgacgacggggaaatcgtcggggtagaaggcgaggttgatgagattttaggttttagtatttttttaaattttttttgattcgagaagtatgaggtttttgagcgatttttttagtagtttaattatagaagttgcgtcgttgaaacgggcgggagaattgcgcgtcgacgtattaagttgtattgcgtaggcgtaggtaggtttagttttttatatggatttacgtattttaggtttatgattttgtttttagttatttttaaatttattattttttatatgaattttattggaatatttttagtttgtaggtattagattgattagaattttgtaaggtttattaatgattattcgatttgttagttttattatttttatagtatttaattttttttattgtaaatgttatatgtattttttatacgtttaagtatattagtttatttttaaatgtagaaattatttaatatagtatatttagtgtttttgatataatgagaacgtgtaatgtttatatagtataatttatttaaggttgattttgtgattaaatataggaaagatagttatattattaaaagatagtatgtatatggttgtgtgtatagtagagtaggaaatagggaaagattgattgggtaagattttttagttaataattttttatttattaatttttagtattgtggtttttaatatataaattagttaatggtatattagaagtttaaattttagttttgtagtggtgatttttagaaaattttttaaataaggttaatagtattaatttattagagatttatggattaaatatgacgaaattatttggatattgttatatagaagttattagaagatattaatttatattattattgaaattttgttattgttgagtattttaataaattagttatgtatagcggtttatttatatgtagtgataatagtttttaagaatatttttgtttttggaatgattattgtatagggtattttaaatatatttgagaaaaattttaatttttattaaaaaattttatttttagatcgggtacgatggtttttttttgtaattttagtattttgggagattgaggttagaggattattttattttcggagattagtttggggaagatagtgtttgtttttaaaattaagaaattagttgggtatagtgggtatggtggtaggtatttgtagattttggtatttaggaggttgaggtggaaggattgtttgagtttaggagtttaaggttatagtgagttgtgattgtattattatgttttagtttggggaagaaaggaagattttgtttttaaaaaataaaatttaaaaatagagaatattttatttttattaaaattgtaaatttttagagtgattgtatttattttaggttaggcgtggtggtttacgtttgtaattttagtattttgggaggtcgaggtgggtggattataaggttaggttggtttttagttttttagtatggtgaaattttgtttgtattaaagtaatataaaaattagtcgggtatggtggtgtgcggttgtagttttagttattcgagaggttgcggttgaattgtttaaattcggtagacggaggttgtagttaagttgagatcgtgttgttgcgttttagtttgggtaatagagattttgttataaaaaaataaaaaagagtgattgtatttattttagttttttaagaaaaagataggtgtaaaaaaatattgtggtgattattaatttattcgttagtgtttttttatttgaagataattttttttttgggtaattttgatatataaaatgttaaaaaaaaaaaaaaaaaaaaaaaaaaaaaggatagttcgaattataattttattttaagatggtagattgttatttaatttaagtttgtgattaatttagaataattatatttaaatttattaattatttttaaattttaatagttatttattttgtgtattatttaatttatgtatgggttttatttatttttattagttaatatttttgttgataaattaatttatattaatttgttatagaatagatgaaaggtatatatgggggaaaaattaagtagaaatttagagttattttatgttagtttagttattgaatataatagatatagaagtatatataaagaattgtagttagaataataggattttagaataaaaagtagaaaataaaatatcggtttttattttataatatgtataattatataatttattaaaattaatttaatataatatataaaatattaatagtagttatttttagattcgataagtattttaaatatagaaatgttaaaatggtaaaattatattatgtaatttttaatttaatgaatttagtttattagtttaggttgaatatttattttttgaagtatttttttaggtatgtaaaagataggattaataggtttaatttgttttttttttaaaagtgataatttagtaattttaaataaggtatgaaaaggatttatttatttaaaaaagaatttatatatagattataaaatgaaaatttttttaattttaaattatgaatatttgatttttattatatattaattttgttagtaataagcgataagaaatttttgtaagattgttttatattttttatatattttataataaatagaaaaaaaaattgtttttaaagtaatattcggaatgttattttggaaatttatggaattatgaagtaatgtaaacgttgaaataatttatagaaatatgttagaaatattatttgttatattttttggtttgtttgtaaattttttcgtttttttattttgatatgttaaaatgaaattacgtagtttttttttattaatttaatgaagttttttaattatttttagggaagttaggatttattatgagtagtatatatttggtaattaggagggaaaaaagttgttataattttatttttttttatttttttaattttgagaataatttaaaagtgggttaagttttatttttaggtaatttgatgtttaaagtgttaaattatgtggaaggacgaaatttagggatatattgatatgtagggtatgaaatatttgtttagaatgaaagataattaattaatgggtaagaagagattaaattttaatttataggtaattatgttaaatattttagtatttattgataagtatgtatttgttttgtttttatttgtaatgaatgtttaatttagttttttaattaagaagttagtagtataattatgaaatttatgggtatagttttgtttttttataagtattgtttaggggggtatatatttgtttaaaattaattaaatttttgttttttaaaatatggtgatagaagtttataaagaaaattttatttaaggttgattttattttaatgagatttttgagtaatttatagatttattagaagttgttttagattgtgtgtaagtgtaggtttcggtgttttttacggttatttatttttttgttgatagttttttaggttttttattttattttattgtagatagttattgcgggtgtttttttattcgttgttatttagaaatattaaggtttaaaaataaaaatataggtcgagtatagtggtttacgtttgtaattttagtattttgggaggttgaggcgggtagattatttgaggttaggagtttaagattagtttgatgaatatggtgatattttatttttattaaaaatataaaattggatgggcgtggtggtgtatgattgtaattttagttattgtattattacgttttatttagagggtaggggtatagtaagttataatttttgagttaaatttatagtgtaggaatagtttttatatttataaattatttaaatatagttttgggttaggtacggtggtttacgtttataattttagtattttgggaggttgatgtaggtagattacgaggttaggagtttgagattagtttggttaatatggtgaaatttcgtttttaataaaaatataaaaattagtcgtgcgtttgtagttttagttatttgggaggttgaggtagaattgtttgaatttgggaggcggaggttgtagtgaattaagatggcgttattgtattttagtttgggtaatagagtaagattttatttgatataggaaatataagtatatttatttataataattgtaattggaatatagttatatttatttattttttattatttatggttgtatttgttttataggataattatatagttgtaaatgagtatttattatttgttttttatagatttgataagagagatttattatgtggaggaaaatttaataattttttttttaaattaaattatttgggtattttttaaataagaagattgtaaataaaaattttgtagtttaatttttaaaaaatttaatttgttaaaattaattgtttttaaatatggagatttttgtataagattgtttggaaatggatattaggattaatgagtattttaatttatgggggtttattttgttaaggggagttttttagtaggatatattattgaaaatttataatagggaaaggtaataaataagtttatggttaatttataatatagaaataggtaagataaagtagtagtatttatttaaggttttaaagttagtagaatatggtttattaaataatatttttttcggttttttattgagttcgtttgagggtaattgtcgtttataaagttattagttaagtaaattagaatttatttgatgtaattgatttgtaattgttagaaattttgtgtaataatagatttaaaattatagatataaagtttatgtgtataataattttttgatattaaaagtgataaaatttaaattattaaaatattattttatattttaagtttttttttttgatttgatatttaaaattttaaatatgtattaatattatatatttgaaaaaatttaagtatattattattagtatgtaattttgtattgaaatattattgttaaaatttttttatggttagtattttata

SEQ ID NO: 259 - DNA, 2455 bp, Artificial Sequence
  chemically treated genomic DNA (Homo sapiens)
ggagtgtaagaatatagaattaaaatagagtttgaaatttaaagaaagggagagatttgggggaggagtggggtggagtgacgtgatgtgttgttggaaattagtagttggtggtttttttttgtgtttttttttttgtgggtttttttttgtttgtgggagggttttttttttttttttcgatagaaaggttatttttggtgttcgtttttttgaattgtaatattttgtaagggtatgattttatgtttttgtgtgggtgtgaatttttttatggtgatttttaaaatttgtatataggatttttttttattgaggggaggggattaaaataattttattttttagggtttttttttgttttaattggtttgtgtttaagagaagttttaggtaaatggggttagtttgaagattaaataggtttggtagtttttttcggtttttttttttttttttatagttttatagttatagttgttttgatattaatattgattttggttggttggtatgattatttatagggtatcgtgttttaatttattaggtgataggtaacgttgtttttttttggaattatttagtagagttagggttgtatttttaaattttgtaatagaggtttttttttattttatttttttgtttttgtattttttttattttagtagtttttttttttttttttgggtttttttttttatttttttttttttttgggtttggtaaattagtttttaatttttttatattttagattggaaggtgggtttttttttgatattttttagagttgttattaattttttttaagtttttatagttttattgtttaatagatttgttaggggtaattattaatttagtttttaattttgtttttttattttttttgttggaggggattttttaattattggttagtatagttaggttattttatttttattattttttttaattttttgggttggggggttggggaggaatttttttattttagggtattaggaataaagttggggaggatggtgtatttaaagggattatatatatatatatatatatttttttttttttttttttataattttattttcgtaatatatatatatatatatatatatatatatatatatatatatatagacgtataaataagttttatggagtagtgattttattatgtttatcgttttgagtttaatttttggtttaaaataggtattaaatagttgtcgaatgtatgaatgatagatatttttttgtttttaggggtgtgtagaagtgcgaaggggtatgggtatgttttagtaggggtgtgagtgttttgattagaattatttttttttgttagaatttgatgtaattcgaatgtttttatttttgtttgaagggtttaaataataaattaggttttgtcgtgttattatgggggtggttatattttgtatttaggaaataggtacggtagggttgagatagaagttttgtttgttttcgtttatttatttgaaatatcgtttatttaggttttattttgtttgttaggtattgttttaagttttgtataaatattaatttagagggtataaatattaatttaagagttgttgtaggaaaaaaaataagcgtttttggttttttaagtttggttttttttttaaaattttcgtaacggttttaaattttttttagggattgggattacggattttggttcgattttttcgcgggttttttattgcgttaattaaattttagaaatagtgagtgttagaggttcggttgttaagtaacggtagagggcgggaagtttgaacgttttggattcgtttcgaaggtaaataggttaattagcgtttagattttttagttacggtagttcgtttttttttttcgttttgtcggatttttaggttggattcgggtttttttaattaatagcggttaggagggcggggcgcgtgcgcgcgtatttcgtttacgcgtcggcgcgttttttttgtaggttcgtggcggtcggttagcggggcgtttttttatttgtagcgatttaggttattgaaaaggcgggaaaacgttgcgatggcggtagttgggggaggaggaagataagcgcgtgaggttggggttttggcgcgtggttggtagaggtagagatataagacgtgtacgattcgttttatagggtttttagattttttttttttaaagggtaattttcgcgtgataggaatgagggtggggcgcgtggagttttttataatttgtattttagttaaatattcgagaatttattttttgtgtttatagttttttacgttttttagttttgtttcgtagttttgtagtagaagtatttagtgttttgtattttgcgcgttattttatttcggttttttttgtgaatcgttgttttcgaatcgtttttattttttgtattcgtaga

SEQ ID NO: 260 - DNA, 2455 bp, Artificial Sequence
  chemically treated genomic DNA (Homo sapiens)
tttgcggatgtaaaaagtgagggcggttcggaagtaacgatttatagaggaggtcggggtagggtggcgcgtagaatgtaaagtattaagtatttttgttatagggttgcggggtagggttgaggggcgtggagagttgtggatataggaggtgaattttcgggtatttaattaaagtatagattgtgggaaattttacgcgttttatttttatttttgttacgcggaggttattttttggaaggaaggggtttgagggttttgtggggcgagtcgtgtacgttttatgtttttgtttttgttaattacgcgttaggattttagttttacgcgtttatttttttttttttttagttgtcgttatcgtagcgttttttcgtttttttagtaatttgagtcgttataggtgggagaacgtttcgttgatcgatcgttacgagtttgtaaaaggagcgcgtcggcgcgtgagcgaggtgcgcgcgtacgcgtttcgtttttttagtcgttgttgattggagaggttcggatttagtttagagattcgatagggcgaggaggagaagcggattgtcgtagttgaagagtttggacgttgattggtttatttgttttcggggcgggtttagaacgtttaaatttttcgttttttgtcgttgtttagtagtcgggtttttagtatttattgtttttgggatttgattggcgtagtgggaagttcgcgagaaggtcggattagggttcgtagttttagtttttggaaggggtttgggatcgttgcgggggttttgagggggaggttaaatttaaagagttagaggcgtttatttttttttttgtaataatttttaagttaatatttgtattttttgagttaatatttatatagagtttagaatagtgtttggtaaataaagtaagatttaaatgagcggtgttttaaataaataagcggaaataagtaggatttttgttttagttttatcgtgtttgttttttgggtatagggtatgattatttttataatggtacgatagggtttaatttattatttaaattttttaagtagaggtggaagtattcgaattatattaaattttggtagagagaagtagttttgattagaatatttatatttttattgggatatgtttatattttttcgtatttttatatatttttgaagatagagaggtatttattatttatgtattcggtaattatttagtgtttattttgggttaggggttggatttaaagcggtgaatataatgaagttattgttttataaagtttatttgtgcgtttgtgtgtgtgtgtgtgtgtgtgtgtgtgtgtgtgtgtgtgtgtgttgcgggggtggggttatgagggagaaagaaaaaaaatatatatatatatatatataatttttttaaatgtattattttttttagttttgtttttagtattttgagatggggagatttttttttagttttttaatttaagaagttaggaaagatggtgggggtgagatgatttagttgtgttaattagtaattggaaaattttttttagtaagaaaggtgggggaatagagttaagggttgggttaatggttatttttggtaaatttgttgagtaatggagttatagaaatttggaggaggttggtgatagttttggggagtgttagggagggatttattttttaatttggggtgtgaagagattagggattagtttattaagtttaggaaggggagggagtggaaagagaagtttagagagggaaagaggagttattgagataggagaaatgtagggatagggaggtgagatggagggaaatttttgttgtaggatttgggggtatagttttggttttgttggatggttttaggagagggtagcgttgtttgttatttggtaaattaaggtacgatattttgtgggtagttatgttagttagttaaagttaatattgatattaaggtagttgtagttataaagttgtaggagagaaaagagaggtcgggagaggttgttaaatttgtttgatttttaagttggttttatttatttaaggttttttttggatatagattagttggaataggagaggattttgagaagtagagttgttttgattttttttttttaatgggaaggggttttgtgtgtagattttgagggttattatgagggaatttatatttatatagaggtatggaattatatttttataggatgttatagtttaagggaacgaatattaaagatagtttttttgtcgggaggagagaaaaaggtttttttataagtaggagaaaatttatagaagaggaagtataagaggaaattattaattgttggtttttagtagtatattacgttattttattttattttttttttaagtttttttttttttttaagttttaagttttgttttagttttgtgtttttgtatttt

SEQ ID NO: 261 - DNA, 2932 bp, Artificial Sequence
  chemically treated genomic DNA (Homo sapiens)
gttaagaataaaatatattaagataaggaaaatttgtagttaagaatagaaaaaaattatggttttgaagtatgagttatttaaagaaagtggaaatatttttagattatgtagtaaaaaataaagtgattttttttttttaaatttatgtaataaattgataggtaatatgtgaaagttatagaatgtagattagaggatataataaatttattttttttatgtttataagaagtaagaaaagttttgatgtgagttagtattgttttataattttgaattgtgtagattgtatgtatttttttttagtttgaagtaaatagtggataggaaaaaatattaaatgttggtagtaaatatggaaggaaattataattaatgtaatatgttaaaatatgttatgtttattttattaatttgaattaaaatgtaagaatttaaaatgttttggaaaaatatgggtattgatttgatgtttgaagttttaaaatattatatattttgaaatagtatttgtattttgaaatatttgtttttatatattttttaaaatttttttttttttttattttatttattattaaataaaggatgaatagatgtaatttagaaattgttaagtatgttgaagaaagattattgtagaaaaattttttttagtttttttaaaggtgttaggaagtagaaaggtgatatagaattggagaggttggagtttttgtattaattgtattaaatgtgaattttgagaaaattttttttaattatgttttgtagttatatggatatgaagatttatgtgaattttgaaagatgtgtttatataagttgaaatgtttttaatgatttagttgatgtgtgtttttttatttgttttttttagagaggtgtaatggaagttagaatattttttttggaaatttaatttgttttgtagttttttgaggaattagtatttagttaatttgggttgggagtagttatttgtggtgaggttgattggttgggtaggaatagtgttggggtgtgggttgagtatagttgttttgttttttttgttataggaagtttgagtttatttgagtagtggtttttttaagtttaaagaagtagaggttgttgtttgttttttttaggtttttttattaaagttggagtatttttttttaaaattttatgttttggtggttgttttaaggagtgtgaggtaggggtatgtaaagttgggagttattatgggatagtttttaagtgttaggtttttagattttttgaatttggtttttatgggagaagggttttttgaggtgtggatagtgtgaagttttttggtaagtttatggggattaagtggggttagatttagatttaggagtttttggagtagtgtttaaattgtagtggtattggattatgttgtttggagtgtgtatagtttgtgtggtgtggggatttgttttttgagtttgtgggtggtgggtgggaggaagtattgtttgtggtgattggaattgggagggagaattgtattggtggtgggtaaagtttagaatgtgttgttagatttttaattttgtttttgtggagatgttggagattttgtgtataggaaagtttttgtagtgtttattgtggttagagtagttggggtattaatggtgggtgtttttttttattgttttttggttttgatgggggattagaggttagttttatttttagtgtgtttgaggtttatgtatttggttaatgagttgtggtttttttttaggttgggatggattttgaaggggattgtaatggaggagtaaagaagaagaatttttttaaattgaataataaaaggtaattagtttgttttatttttatagtttatatagttgtgagatttgagtaatttatttttagtttttagttttgaaataaatgatatgttgttgtttttaattatttttaagaaatgtaagttagtttttggaattaatatttttgtttagagtagaagtttgttggttgagtggagtatagtatatgtattttttttgttttttttgtttttttttttaatgatatataatattttatatatttatgaaatggggtatatggaagtgttttttatatgtttggaatgtgtaatgattaagtttgggtatttgaaggatatattattttaggtatattttatttttatgtgttgataatattttaagttttttagttattttgaaatatataatatattgttaattgtagttatttttgtttgttattgaatattggaatttatttgttttatttaattgtttttagttatttattaatttttttttattttatttttttattttttttggttttttttttttagttttggtgtgttttttttttagtttttttgttttagataggtggatgtttatatgtgtttttgttttatgaatttttgttttttaagtggtgttggttgtttatatgtgagttatatgttgttggtgatttgttttgtggtttaggtttttgtttttggtaaatggttatgtaaatattgtgtttgtggtttggttgatgagatagaaggttaaaagtatatttaggttgttaattggtaataaatatttgtatataatattggtaatgtaattatatagggaaaataattatttaaagtaaattttgattatggtgttttgtttttatagaatatttaaaattttattaaatagatttattgttagtagtaaattgtaaaatagattagtaagtttaataatattagaaattgtaatgtaaattataagataaattagttaaatatattaatattataagaaattaagttttttagtgtaagagaaaaaatataaatgtggaaattaaatatatttttaaaaataatgttaagtttgaattagaaattttaatatgaatt

SEQ ID NO: 262 - DNA, 2932 bp, Artificial Sequence
  chemically treated genomic DNA (Homo sapiens)
aatttatattgaaatttttaatttaaatttaatattatttttaaaaatgtatttgatttttatatttgtatttttttttttatattgaaaagtttggttttttataatattaatgtgtttagttaatttattttataatttatattatagtttttaatattattaaatttattagtttattttataatttattattaataatgaatttatttagtgaagttttaaatattttataaaggtagagtattatgattaaaatttattttaaataattattttttttatatgattatattattaatattatatatagatatttattgttagttaataatttaaatgtatttttgattttttgttttattagttaggttataaatgtgatgtttatatagttatttattggaagtaagagtttggattatagagtagattattagtagtatatggtttatgtgtgggtgattaatattatttgaaaagtagaagtttataagatagaaatatatatgagtatttgtttgtttggggtaggaaagttgagaaagaggtatattaagattaagggaaagaggttgggaagggtaaaaaggtgaaatgaaaagaggttggtgaatgattaagaatggttggataggataaataagttttaatgtttgatagtagatgagggtgattatagttagtaatatattgtatattttaaagtagttagaagatttaaaatgttattaatatatagaaatgaaatatatttaaggtgatgtattttttaaatatttggatttgattattatatattttgggtatgtaaaaaatgtttttatgtattttattttataaatatgtaaaatattatgtattattaaaagaaagaataaaaaagatagggaaaatgtatatgttgtgttttatttagttaataaatttttgttttaagtagggatattgattttaaaggttagtttgtgttttttaaaaataattaaaaataataatatgttatttattttagagttggaggttagaaataaattatttaaattttgtaattatgtaaattatgaaaatgaaataagttagttattttttattgtttagtttaaaaaagttttttttttttgtttttttattgtggttttttttaagatttattttgatttgaagagaaattgtagtttattagttaaatgtatgagttttaggtgtgttggaggtgagattaatttttagttttttgttgaagttagagagtagtaagagggagtgtttgttgttgatgttttagttgttttggttgtgatgggtattgtaggggtttttttgtgtgtggggtttttagtatttttatgaaggtagagttgggggtttggtagtgtgttttggattttgtttgttgttagtgtgatttttttttttggttttagttgttgtggatgatgtttttttttatttattgtttgtgggtttagagagtaggtttttgtattgtgtgggttgtgtgtgttttgggtaatatggtttagtgttattatggtttgggtgttgttttaggagtttttgagtttagatttaattttatttggtttttatggatttgttagaggattttatattatttatgttttaagaagttttttttttgtgaagattaagtttaggaaatttgaaagtttgatatttgggaattgttttatagtagtttttagttttgtgtgtttttattttgtgttttttggaatggttattaagatgtgaaattttggaagaagatattttgattttagtggaaagatttaaaggaaatgaatagtggtttttgtttttttgagtttggaagagttgttatttgaatgagtttaggttttttgtggtaaagagagtgaagtggttgtgtttagtttatgttttggtgttgtttttgtttagttaattagttttattatagatgattgtttttggtttggattgattgaatgttgattttttgagaaattgtgaaataggttgaatttttaggaggaatgttttggtttttgttgtatttttttagaaagggtaagtagagaaatgtgtattagttgaattattggggatattttaatttatgtagatatgttttttaaagtttatataagtttttatatttatataattataggatgtagttaagggaaatttttttgggatttgtatttaatatagttaatataaaaattttgatttttttaattttgtattatttttttgttttttaatatttttgaaaaggttaggagaaatttttttgtagtggtttttttttagtatgtttgatagtttttgagttatatttgtttattttttatttgatgataaatggaatgaaagaaaaaggaagttttaaaaaatatatagagataggtattttaaggtataaatgttattttaaagtgtgtaatattttaaaattttagatgttagattaatgtttgtgtttttttagggtattttaaatttttatattttaatttaaattagtaaaataaatatagtatgttttagtatattatattagttgtaatttttttttatatttattgttaatatttaatatttttttttgtttattatttattttaaattgaggaaaagtatgtgtaatttgtataatttaaaattgtaaagtaatgttaatttatattagagttttttttattttttatgaatatagaggaaataggtttgttgtattttttagtttatattttatgatttttatatattatttattagtttattgtataagtttagaagaagaaaattattttgttttttattgtatagtttgaggatgtttttattttttttaaataatttatattttaaagttataatttttttttatttttgattataaattttttttattttgatatattttgtttttggt

SEQ ID NO: 263 - DNA, 7432 bp, Artificial Sequence
  chemically treated genomic DNA (Homo sapiens)
atttgaagttagagttatttagaggagaaagagttggaattgagaatttaaggaatgtttggaagtgattgggtttgagtttatttaggaagaaatagaggttggagatatgagattgtgttgttatttttttttattaatttttgggttttattgaggttttattataagtttggttttgtagtttagtgattaggagaaattagatataagataataataatagtaatgattttttttttttttttgagatggagttttgtttttttgtttaggttggattgtagtggtgtgattttggtttaatgtaagttttattttttaggtttatgttatttttttgttttagttttttgagtagttaggattataggtgtttgttattatgtttggttaattttttatatttttagtagagatggggttttattgtgttagttaagatggttttaattttttgattttgtgatttgtttgttttggttttttaaagtgttggggttataggtatgagttattgtgtttggttaatagtaatgatttttgagtatttatattgttagtttttatggtaagagttttttttattttttgttttgttttgttttaagatagagttttgttttgttatttaggttggagtgtagtggtgtgattgtggtttattgtagtttttattttttgggtttaagttatttttttgttttagttttttaagtagttgggattataggtatgtattattatttttggttaatttttgtatttttagtagggatagggttttttattatgttggttaggttggttttaaatttttggttttatatgatttgtttattttggttttttaaagtgttgggattataggtgtgagttattgtgtttttttttgtatttgtttaagtaatatattgaaatatgtattgtgttttttattttatggaggaggaaattgaggttagtaaatgaggttgttatgggaggtggagataggatttgaatttgttttagtgtaggaggtttaagagtttttgtttttttttagggtattgtgtgggagggtgagaaggagggaggtttatagaggtatgatttttgattgttattgttatttgggttttgttttttgaagtttttgttaagtggggaggtggttgggggagggttttgttttgtgtagtttttttttttttggtttgtagagttgagtatagagggatagaggtatggaatttttagaaatgtttttttttagaaataggttttaggttttgtttgttttgtgtttttgtgtgttggttttggtttgtattgggggtgagaagaagtgggtggagggatgtggggtttatatttggtgggtgtgagtgtggttgtgtgttttgtggttttgtagttatgtgagatatgagtatggagtgtgtgtgttttatggtgtgtgtatgtatgtgtgtgttggggagtgtgtgtgttggtggttgagagtgaagtgtgaatgttatattggtataaattgggattatttgtgtgtgtgtatgtgtgtgtgtggaagtgggagtatgtagttgtggtaaaaaagtgtatgtttgtgtgtatatgtgtatttgtgtgtatttgtttttttgtggggtatgtgtgtgtaaaatatttgagtgtgtggatatgtgtgagggggtgagtgtgtgttggtgtgtatgtttgtgttttgtatatgtatttttttttttttttttgagatggagttttattttgttatttaggttggagtgtagtggtagtagtggtgtgattttggtttattgtattatttgtttatttgttttaagggatttttttgttttagtttttagagtatttgggattatagatatatgttattatgtttggttattttttttttttgagatggagttttgttttgttatttaggttggagtgtagtggtgtgattttggtttattgtaatgtttgttttttgggtttatgttatttttttgttttagttttttgagtagttgggattataggagtttattattatgtttggttaattttttgtatttttattagagatggggttttgttgtgttagttaggatggtttttatattttgattttgtgatttgtttgttttggttttttaaagtgttaggattataggtgtgagttattgtgtttggttaatgtttggttaatttttttatatttttggtagagatagggttttgttatgttgtttaggttggttttgaaattttgattttaggtgatttgtttgttttggttttttaaagtgttgggattataggtatgagttattatgtttggttatgtattttatgttaaaatgggattatattttagattagtattatttagtagaaatttaaatttttaatatagggttaggtatggtggtttatgtttgtaattttagtatttttggaggttgaggtgggtggattgtaaggttaggagatttgagattattttggttaatagatgggtaaaaatttatttttattaaaaatataaaaaattagttatgtatggtggtatgtgtttgtagttttagttatttgggaggttgaggttggagaattatttgaatttgggaggtagaggttgtagtgagttgagattgtgttattgtattttaatttgggtgatagagtgagattttgtttgaaaaaaaaaaaaaatttaatatgtatgtagataatgtgtaaggtattattttatgtgtattgtatgtagtaatttttaatttttatgataattttgaggtagatattattattttgttttataaaaggagaaatagttttggggagataggataagttattggttaaggtatatagttagttatatgtggtttttgtgtgatggttggtttttgtaggtgaggttttgtttagatgtgtgggtagaaggtttggtttggaaagaggaattgatagtaaggttaagttaatgtttgtttttgggggtagaaagttattttttgttttttttttattgtttatagaggtagtttagatagggtgggggttataggagaatgaagggagaagggggtagtttttgggtagtaaaattaggtggtgaagggaggtattagaggatggtaattagagaggttattagaggggaattataggtagatagggtgataggagggattattgatataaggtgaagagatggtttagttggatggggtggtttatatttgtaattttagtattttgggagtttgaggtgggtggattatttgaggttaggagtttgaggttttaatatggtaaaattttattttttttaaaaatataaaaattagttgggtatgatggtagatgtttgtaatttttgttatttgggaggttgaggtaggaaaattgtttgaatttaggaggtggaggttgtaatgagatgagattatgatattgtattttattttgggtaatagagtaagagattgattttgttttataaaaaaaaagaaaaaagaaaaaaaaaaagagatggttgatggttaaagaggggttagtggttaggggatatataagggtaaaggtaggaggtaagaggattggtagggggttgtttttgggttattgggagtgatataggatgagtatggagggaaagggagaaggggattttagggttttagtttatttaagttgttttttggttttatttagtatgttagttagaggtttaggaaggaattttgagttttttattaaagttaaagatgagttgttggagtttggtgaggggtaggatgaaggagttgttggagatagtggtgaataggattagagatgggtggtaatggttttggtgagggtgtgttgggttgggtggtgggaggggatttttgggtttgagggaggaggggttggggtttggatttttgagttttagggaggaggaaagggtgggagtggggttgtgatttttaggtttgggaggagtggagggttagagttgagagtaggaatttttaggttatagagaggagtggataaatggggtagagaatatttggggagagttggggtttttattgtgatgtttttttttttgtaggagtttgagtattttttggggttttatgtagatttattatgatgattatttgagggatttgggtttgtttattaaggtttggttttttgaatttaaagatagttttttgaagaagatttatagtttgtgttttaggtttgtttgtggggataaggattagggttaaaatgtttataaaagttaggtgtggttgtggtgggtgtttgtagttttagttatttaggaggttgaggtaggatgatggtttgagtttaggagtttgagattagtttgggtaatatagtgagattttttgggggtaaaataaaaagaaaaaaaaaagtttatatttttttaataaataaagttttatttgtgtttttgtttggatttttttttagtgtggttagaaaaaaatttattttattgttttttaggaattaatgagtagaagaggtgatatttgatggggaaggaagagtagggaggttgggaagggtattaaggaataatattttattgtgggtttgtggagaatgggggattttaaggtgtgttagttttaggagggtgagggtaggagtgtgggtggagttagtaggtttttatgatggtttttattgagagttttgtttttgttttttataagttttgattttatttttagtgggtatttagtatttttaatttttttatagtttttaatttagtttttgttggaggtgaatttttagagtgagggttttttgttatttgagagaaggttttttgtgatgtgattttgggggatgttattgttttttttgtttttatttattttttttgtagttttgttggttaggattttggtttagataaaggatgggggttgtggttgtggagtggaagtgggttttaattattataaattttttttgtgtttgtttggagttggtgaggatagtttgttagagtttggtaagaaagggatttagggtgtggggataggggggtgttagtagggagagggtaaagattgataaagtaggaattttaagaggtataatattagaagtttgtgttggaattatgattgtgtgtgtgtgtgtgtgtgtgtgtgtgtgtgtgtgtgtgtgtgagagagagagagagggagatggagttttgttatgtagtttaggttagatttaaatttttgggtttaagtaatttttttgttttagtttttttagtagttgggattataggtgtattattatattttataaattatagaatttagaattgtagattatttgagtttttgtttagagttagggtggttgaggtggggaggattttttgagtttaggagtttgaggatgtagtgagttgtgattttgttattgtgttttagtttgggtgatagagaaattttatttttaaaaaagagaaagaaaaagggataggtataatggtttatgtttgtaattttagtattttgggaggttgaggtgggtggattatttgaggttaggagtttgatattagttttattagtatggtgaaattgtatttatattaaaaatataaaaattggttgggtgtggtagtatatgtttgtaattttagttattttagaggttgagataggagaattgtttgaatttaggaagtggaggttgtagtgagtttagattgtgttattgtattttagtttgggtgatagagtaagatttagttttggtggaaaaaaagaatgaaaaaatttaaaaaattaaaaaagaattgtaggttgggtgtggtggtttatatttgtaatttaaatgttttgggaggttaaggtaaatggattatttgatgttaggagttggagattagtttggttaatatggtgaaattttgtttttattaaaaatataaaaattagataggtatggtggtgtatgtttgtatttttagttatttaggaggttgaggtaggagaattgtttgaatttggaagatagaggttgtggtgagttaaaattgtgttattgtattttagtttgggtgagagaataagattttgttttggaaaaaaaaaaagaattgtagattatttgtttgtgttttttttttggggattagattttattttttttttgttgtatttttttattttttatgtgtggatgatgatattgtgttttgtgtatgttttttgttattaaaagtgttttttttatagagtaggtgagaatttagtgaggagatgtagggatatgaggtttgatttagggtagagttttaaggtaatatatttgatttattgtaggtttttaatggtgtttgtagagtatttttttgtattgatttagttttagtaaagggtagaggttttgttgtgttttttgttgggtttagaattgtttaggtgtttaagaaagttttttaggttgggtttagtggtttatatttgtatttttagtattttggggaggttgagatgggaggattgtttgagtttaggagttttagattagtttgggtaataaaataagttttttatttttataaaagaataaaaattagtagttgggtatggtggtttatgtttgtaattttagtattttgggaggttaaggtaggtaaattatttgaggttaggagtttaagattagtttggttaatatggtgaaattttatttttattaaaaatataaaaattaggtggggtatagtggtttaagtttgtaattttagtattttgggaggttaaggtgggtggattatgaggttagaagtttgagattagtttggttagtatggtgaaattttatttttattaaaaatataaaatattagttgggtatggtggtaggtgtttgtgattttagttttttgggaggttgaggtagaagaattgttagaattttggaggtagaggttgtagtgagttgagaatatgttattgtattttagtttgggtgatagagtgagattttattttaaaaaatatgaaaataaaaattagttgggtggtggtgggtgtttgtaattttagttattggggaggttgaggtaggagaattgtttgaatttgggaggtgggggttgtagtgagttaagattgtattattgtattttagtttgggtaatagagtgagattttattttaaaaaagaaaaaaataataattaaaatgttaaaattaggagtagaattatagaatgttggaaagtgaggtttaagaagggggttgtgtttaagtttatgtatgggaaatttgattgggatattgagtttatatagagtaggattttagttttttttattagagtggggtgtgattataggaatagttgtttttagttagtttgttatatgatatttttttaatgttttagg

SEQ ID NO: 264 - DNA, 7432 bp, Artificial Sequence
  chemically treated genomic DNA (Homo sapiens)
tttggaatattgagggggtgttatgtggtaggttgattggaggtggttgtttttgtggttatgttttattttggtgggggggattgagattttgttttgtgtgagtttggtgttttagttaagttttttatgtatggatttggatatagttttttttttgggttttattttttaatattttgtgattttatttttgattttaatattttaattattattttttttttttttgagatggaattttattttgttgtttaggttggagtgtagtggtgtaattttggtttattgtaatttttattttttaggtttaagtaatttttttgttttagtttttttagtagttgggattataggtatttgttattatttggttgatttttgtttttgtattttttgagatggagttttgttttgttatttaggttggagtgtagtggtgtgtttttggtttattgtaatttttgtttttagggttttagtaatttttttgttttagttttttaaggagttggaattataagtatttgttattatgtttggttaatattttgtatttttagtagagatggggttttattatgttggttaggttggttttgaatttttgattttgtgatttgtttattttggttttttaaagtgttaggattataggtttgagttattgtgttttatttgatttttgtatttttagtagagatggggttttattatgttggttaggttggttttgaatttttaattttaagtgatttgtttgttttggttttttaaagtgttggaattataggtatgagttattatgtttagttgttaatttttatttttttgtagagatgggagatttgttttgttgtttaggttggtttggaatttttgggtttaagtgatttttttattttggtttttttagggtgttgggagtataggtgtgagttattgagtttagtttagaaggtttttttgagtatttaaatagttttgggtttagtagggaatatagtaaagtttttgttttttgttaaggttgagttagtgtagggaggtgttttgtagatattattaaggatttatagtagattaaatgtgttattttagggttttgttttaagttagattttatgtttttgtatttttttattgagtttttatttgttttatgagagaggtatttttggtgatgaagaatatgtatagggtataatattattatttatatgtaggagatgaggaagtatggtagaaagagggtgagatttgatttttggagaaagaatataagtaaatggtttataattttttttttttttttaagataaggttttgtttttttgtttaggttggagtgtgatggtgtaattttggtttattgtaatttttgttttttgggtttgagtgatttttttgttttagttttttgagtaattggaaatataagtatgtattattatgtttgtttaatttttgtatttttagtagagatggggttttattatgttggttaggttggtttttaatttttgatattaagtgatttgtttgttttggttttttaaagtgtttggattataagtgtaagttattatgtttagtttatagtttttttttagttttttaaatttttttattttttttttttgttaagattgagttttgttttgttatttaggttagagtatagtggtatgatttgggtttattgtaatttttgttttttgggtttaagtaatttttttgttttagtttttggaatagttgggattataggtatatgttattatatttggttaatttttgtatttttagtatagatgtggttttattatgttggtaaggttggtgttgaatttttgattttaagtgatttatttgttttggttttttagagtgttgggattataggtatgagttattgtatttattttttttttttttttttttttagaaatggggtttttttgttatttaggttggaatatggtggtaagattatagtttattgtatttttaaatttttgggtttaagggattttttttattttagttattttaattttaagtagaagtttaaatagtttatagttttaaattttgtgatttgtggagtgtggtggtgtatttgtagttttagttattggggaggttgaggtaggaggattgtttgagtttaggagtttgagtttagtttgggttatatagtgagattttattttttttttttttttttttatatatatatatatatatatatatatatatatatatatatatagttatggttttaatatgggtttttaatattgtgttttttaaaatttttgttttattgatttttgttttttttttgttgatgtttttttgtttttgtattttgagttttttttttattagattttggtaggttgtttttattagttttggatgggtatagagaggatttatagtggttgagatttatttttgttttatagttataatttttattttttgtttaggttaaagttttggttaatagaattgtggagggggtgggtggggatagaaagggtaatgatgttttttaaggttatgttatagggaatttttttttaagtgatagggaatttttattttgagaatttgtttttgatagaggttgggttgggggttgtggaggggttggaggtgttgggtgtttattgggaatggagttagagtttgtaggagataagggtgaagtttttagtgagggttattatggggatttgttgattttatttatgtttttgtttttatttttttgaaattgatatgttttgaagttttttattttttgtaagtttataatagggtgttattttttgatattttttttgatttttttatttttttttttttattaggtgttattttttttatttattgatttttgggaggtagtggggtgggtttttttttggttatattggggaaggatttagatagggatataggtgagattttatttattggagaagtatgaatttttttttttttttttgttttatttttaagagattttgttgtgttgtttaggttggttttgaatttttgggtttaagttattattttattttagttttttgagtagttgggattataggtatttgttataattatatttggtttttatgaatattttaattttggtttttgtttttatagataagtttggggtataggttgtgggttttttttaagaggttgtttttggatttgaggaattaggttttggtgagtggatttaggttttttaggtggttgttatagtaggtttgtatgaagttttggaaggtgtttgggtttttataggagagaggatattatagtggaggttttagttttttttaggtgttttttgttttatttatttgtttttttttgtgatttaggagtttttgtttttagttttaattttttattttttttagatttaggggttatagttttatttttattttttttttttttttgagatttaggggtttaggttttagtttttttttttttagatttaggagtttttttttattatttagtttagtatatttttattagaattattgttatttgtttttggttttgtttattattgtttttagtagtttttttattttgttttttattaggttttagtgatttatttttagttttggtggggggtttagggtttttttttgggtttttggttggtatgttaggtggaattagagggtaatttgggtaggttgggattttagaatttttttttttttttttttttatgtttattttgtgttgtttttggtggtttaggggtagttttttgttagtttttttgttttttgtttttatttttatgtgttttttgattgttaatttttttttaattattagttattttttttttttttttttttttttttttttttatgagatagagttagttttttgttttgttgtttagggtggagtgtagtgttatgattttgttttattgtaatttttattttttggatttaggtaatttttttgttttagttttttgagtagtagggattataggtatttgttattatgtttggttaatttttgtatttttagaagagatggggttttgttatgttggggttttgaatttttgattttaagtgatttatttattttgggtttttaaaatgttgggattatagatgtgagttattttgtttggttgggttatttttttattttgtgttagtagttttttttgttattttgtttgtttgtggtttttttttaatggtttttttaattgttattttttgatgtttttttttattatttgattttgttgtttaggaattatttttttttttttttgtttttttgtgatttttattttgtttgagttatttttgtggatagtggagggagagtaggaggtgattttttgtttttaggggtagatattggtttagttttgttgttagtttttttttttgggttagattttttatttatgtatttggataaagttttgtttatagagattagttgttatgtgggggttatatgtagttagttgtgtgttttggttggtgatttattttgtttttttaggattgtttttttttttgtagaatggggtaataatatttattttagggttattgtgagaattaagagttattatatatgatgtatatggaatggtgttttgtatattgtttatatatgtgttaaatttttttttttttttagatggagttttgttttgttatttaggttggaatgtagtggtgtgattttggtttattgtaatttttgttttttgggtttaagtgattttttggttttagttttttgagtagttgggattataggtgtatgttattatgtatggttaattttttgtatttttagtagagatgggtttttatttatttgttagttaggatgattttaaattttttgattttgtgatttatttgttttggtttttgaaagtgttgggattataggtatgagttattgtgtttggttttgtattaaaaatttaaatttttattggataatgttgatttagaatatgattttattttaatataaagtatatggttgggtgtggtggtttatgtttgtaattttagtattttgggaggttaaggtgggtggattatttgaggttaggattttaagattagtttgggtaatatggtaaaattttgtttttattaaaaatataaaaaaattagttaggtattggttaggtgtagtggtttatgtttataattttagtattttggaaggttgaggtaggtggattatgaggttaggatatggagattattttggttaatatggtgaaattttgtttttagtaaaaatataaaaaattagttaggtgtggtggtgggtttttgtagttttagttatttgggaggttgaggtaggagaatggtgtgaatttgggaggtggatgttgtagtgagttaagattatgttattgtattttagtttgggtaatagagtgagattttgttttaaaaaaaaaaaatagttaggtatggtggtgtgtgtttgtagttttaaatattttgaagattgaggtaggagaattttttgaaatgggtaggtggatgatgtagtgagttaagattgtattattgttattattgtattttagtttgggtgatagagtgagattttgttttaaaaaaaaaaaaaaaaatgtatatgtaaaatatagatgtatatattagtatatatttatttttttatatatgtttatatatttaaatattttgtatatatatattttatagagagataggtgtatataaatatatatatgtatatagatatgtatttttttattatgattgtatatttttatttttatgtatgtatgtgtatatatatagatgattttagtttgtattaatgtgatatttatattttatttttagttattgatatatatattttttgatatgtatatgtatatgtatgttatgaaatgtatatattttgtatttatgttttatgtggttatagagttataggatatatagttatatttatatttattaggtgtgggttttatatttttttatttatttttttttatttttaatgtaggttaggattagtatgtagaggtatagggtaggtagggtttggagtttgtttttgaggagggatatttttgggggttttgtgtttttgtttttttgtgtttaattttgtgggttgggggaggggaggttgtatagagtagggtttttttttggttatttttttgtttggtagagattttagagagtagggtttaggtgatagtggtaattagaggttatgtttttgtgggttttttttttttttatttttttatatagtgttttgagagaagatagaggtttttgagttttttgtattgaggtaggtttaaattttgtttttattttttatgatagttttatttgttggttttagtttttttttttataaagtgggaggtatagtatatattttagtatattatttgaataaatataaagaaaggtgtagtggtttatgtttgtaattttagtattttgggaggttgaggtgggtagattatatgaggttaggagtttgagattaatttggttaatatggtgaaaaattttgtttttattaaaaatataaaaattagttagaagtagtgatgtgtgtttgtaattttagttatttgggaggttgaggtaggagaatggtttgaatttgggaagtgaaggttgtagtgagttgtgattatattattgtattttagtttgggtgatagagtaagattttgttttgaaataaaataaaataaaaaatgaagaaagtttttattgtggagattggtaatataggtgtttaaagattattgttgttggttaggtgtggtggtttatgtttgtaattttaatattttgggaggttgaggtaggtggattatgaggttaggagattgagattattttggttaatatggtgaaattttatttttattaaaaatatgaaaaattagttaggtgtggtggtaggtgtttgtagttttagttatttgggaggttgaggtaggagaatggtgtgaatttgggaggtggagtttgtattgagttgagattgtgttattgtagtttagtttgggtgaaagagtaagattttgttttagaaaaaaaaaaaagattattgttgttattattattttgtgtttaattttttttagttattgggttgtagggttaggtttgtggtagggttttaatagggtttaagggttgatgagaggaaatagtaatatagttttatgtttttagtttttgtttttttttaggtgggtttgagtttgattatttttaagtattttttgagtttttaattttaatttttttttttttgggtgattttggttttagat

SEQ ID NO: 265 - DNA, 12423 bp, Artificial Sequence
  chemically treated genomic DNA (Homo sapiens)
tttatttgagttttttttgttgtagagaaagtttttttgtgattttatttttttttttaaatgttgggaaatgtttttgagttttgtttttgatatatatattttttttgggttgagggatggggattgggatatatgttttgggaagggtaggtgtagagtgatggggttgatggggtgggggaagtagggggaggagttgtttttttgaggtttttgggaattggttgtgttaggtatttttagttttttagttaagtaatatagagagttaaaagaggttattagagataagaaggtttttatggggttattgtttgtgggggatgttagtagtggggaggagtgaagtaggaaggaattgggagattggatggaattgttttttttatatggttatatatagttatatatggttattgggattagagttagttttgtttgggtagttaggtttttagtgtaagttattagtttatttggaggggattagtgttttggttaataaggttagttggtttttttttagttggagtttatttaattttgttaggaagttagagagttggataagtggagtttagtttggggaggtggaagagagggaggatggagtatggtgaagtataggtggtttttttggtagttttagttttggttttggaatagtttgggtagtgtgttaattttttttgttattgttgttttattgatttttatgaatgagttgtgaggtagttatttttagttttttatggataaatatttgaggtttagagagggtaagagatttgtttgtgattttttagtatttttgtttttttttggggttttgagggtataataaagatttttaaggttttttttttttgtaggaggtttaggtgtagttgtgggggagggtgtttttggtgttttttgtttttgtagttagtttgttttttatttggtagttttttttttttttttgggatgagatgtgtatgtgatgatgggattttgtaaatgggttgggaagaaggagttatttttttaaagggttagtttttttaggagtgtttgaatttttaaagggggtagggttttatataaattttatttagaagtaggattataagagtttttgtagtatttttttttttttgttggttttttttgagtgtgtattttgttttattagtggaatatttgtgggttagggttattggagatagggttatattgtttgggtggttatttaagtaattttattattttgagtattttttttttttatttgaaaggtggggggttatttatttagtttttagggttgttaaggtgattaaatgggataatggttgtattatttttgagtaaagggtattatagatgggaagattattttagttttgtagggagttagatgggttgtgagggaggggtaaaggtagggttggagggggttggaggggttggttgagtagggtatatatggggggggtttttttttaaatttagaaaaatttttagttaggtttagtgtttttgttgagaaattgaggtttaaagaaaggaattttttgtttttttgtttttttttttttgtttgaggttatttatttatttaataattttgtgtttgatattagataaggttttagtgagtaaaatgaatatagtttttttgggaatatagagtttagatagggagatgattattttattattgtaaatataaatatataattttagtttgggttaagtgttgtgaagttttagatttgtgtttggtttggtgttgtattttaagtattttggtatttaagtggtattgaaatatttgttggaaagaaggttattttgaggaggtgatgttagagttgaggtttggagggttggagttaaataaagatggttttaggttttttttgttttttttgtaggttttgtttttgttttttttttggtatttaggttaagggtaagtatttttgattggttattagttttaatatgttgagtatagggattagattttgttttgtgtggttggttttttttaggttttgaatttagggaagtgtatgtggattttaatttatttagatggtgtgtttgtgtttgttttttttttgggtatgttttagaatagagtttagtttagagtttaggggtggttgggatgatggatgagggtgtggggtttgttgattattaggggatttgattattgggttgggttagtttttttgtttttatttttttttttgtaaagaaggggtgttgggtgtttttattttttgtgttagttttggggtttttattttggtgggaagggtaggttgatttggtagattgtggttttttgggagggaagaaggtgttagatgtgtggagtaattataaatagttttttttttttagaagatggtatggggtttaagatttaggtgttgtatatttagaatgagagtagagatttttgttaggaaaaaaaggtatttaggggatttgtttattagtatgaaatgtaaatgagtttgtttggttttatttatataattttgtgtatggatttggtgaaagggtaattagggagatgatggtgtagtagttattttgttattttttttattttttttttttattggttggggtgggaattgagatgattttaattttttgtggtggtgggaggtgtgtgggggttgtgtgggtggtgtagttttaggagagtgaataatgtttaggggtgatggttttagtaaagtgaggggtggtgatggaggttatttgatttattttgttgtttttttgtagtggtgtaagtgttttaaaatttttggagagggaattgattgatttattaggttttgttgtgtttattttttgtagatgttggggaagtgttttttggtgtttaatttttgttgtttttttttttattggtgtttagtatatttgtggtgttttgtttttgggtatttatagttttttggagtggtgttggtggtaggagagagttagagttgattgagttttagaatttggggaggtaggtggggtaagggttggggtttgtgtgtgtgtgtgtatgtgtggaaagtataaatttatgagggtttgttgttggtagggttaaggtgagtgagtgaaggtggtagatttgtgaagttttagttttgtggatattttttttttaagttatatagggatttaagagaaattgaggtatgaagttggggggtggtggtggtggggattttgaaggttgagttgataaagtttagttttgtgtttttgtttttttttatatatttgagatttttataggtttttttttaggggtttttgttttgttttgtagttttttttggggatttgggttttgtggtttagtgtgatttgtttggggttatgtgtttaagtatgaagtttttgtgtggagtttatgttttttaaaaggtttttaggggtaaagggatgaagtttaggagtgttaatgtgaggttaggtttagtgggttagggttatgaggttagggttgaagttttagaattgatttgggagtatgattaataagtttaagagatttgtggaggttatgtttagattatgtttattttagttttttttgagttttgtttgtttttttaagattgggtttttttagtttgaagttttatttttaggatatttagttttgtttttttttttttttagttttgtagttaagtttaattttagggtgggagattaattaggtggagatttgggattttgttttgggattttttggtgataatttttatttttgtgttgtttgtttttttttttttttaggtttgtttagagttgagttttgttttttggttgttgtttaaattaggggttgtggataaaggatgtttggggtttgtggttttatgttaggattttgtgttgaatattttgattttttgggttttttttaagggagttttaaagattttaatggttaataggaaagtgggtttggtttgggtagtagtttgattggttttagtttttgggagtggatttaggggtaaggggaggggagaggggtggttttgggttttggggtgggaattggattttagttgtggttttttttttgtgtttttgtttgtattgttatggtggatggttaatgggtgtgtggtttggggttggtggtgtttggtgattggttgtggggttgtttgggggtggggttgaggtttgaagttgaagtgagggatttagttgtggtgtgtgtggggttttttgttgttgtttttgtttgtttgttttgtgttttggttggaggaggaggttgtggtgttggtgatagttatggtagtggtagttattgtggtggttgtggtggtggtatttttgtttttatttttgtttgggattgttttttattgtttttttgttttttttggatagtgagtttgtggtggggtgggggaaggagttgtttttattttttttaagtttatttttaaagagattttttttttttttttttgttgtttggtgtggagttgggatgatgttgattttttagatttggttttagttgtgttgtgggaagagggggtgtttttttttggatttttgttttttgttgttgtttttttttttgtttgtttttttggggtggttttgttgaaggtagtgttgaatttggtaattggagtttgggtgtgaagtgaagaagttggaataaagtgagggggagttggttggttggtttgggaagttttaggggtgtaggggaagtgggatttgtgttgggtggggtttttttgtgttttggtgttttgtgggtagtatgtttttgtgggtagggggagttgggttgaattggtttttttgggggtttagtttgtgttttagagtttattagatgtgtttttgttggggtttttgggttgtgtgaggatattttttttgaggggtgttgtttgtttttttttggattgtttggggttttggttggttagaggatggatgaggaggaggatggagtgggtgttgaggagttgggatagttttggagttttatgtggtttaatgatttgttgggggttgggggtggttggggttggggttagtagaaaaggatttgggtagtgtggattttgaggtggaggggttgttgtatttggtgttggttttggtggtttttttttatttgagttaggatagttgtttgtggagttggtgtttttgtatggtttgtaatttatattttttggggtatgatggttaggtgtggggttagaagggggatgggttgtattgttgggggttgggggggaagaagatttattgttaggtgagttgaagtgagtttggagggtaggtggatggggggggggttgttagggaggggagggggtattagagtgggagtggagatgtgagtaggttttgttggtaatttgggtttattttatttgtgtatatatattttagtttttttgggttgggggggtggggatttaggttaggagaagagagttgtgttttgttggtttgtagttggatgttttttagatgtggttaggggagggttgttattttttagatgtgggaagttttgggagtttgggagttgtattttgtttgtgttggttagtgagttgggtttggtttttgagtttggtggggggtgggtgggggtggtggggaggaagttgtggggatggaggaggggggattgtaattttttgggttttttttttttttttgttttaaagtttgtggtggattttagggtttgattttttaatttggtttttgaggttgaggtttttattgatttagaaggagatgttggggggtggggattaggttttggtttattttattttttattttgtgggttggaggtataataaggagattttggtggtggttgatgttaggggtgtagaatgagaataagatgtggtggaggggagttgtttgtttttggagttgggagtggagtttttttttgttagagtttagtgttgtgggtgttttttatttgatttttatttgatgtagggtgtttaagattgggttggggagttttatgttggattttttttgtggagggaaagattgtgttaagagtttttttagtaagtgggggatggggttaagttggtttaggttatttttttttttttataaataaagagtgtttttgtagattaggtatgggggattgtaggtttgtgaaagttttgaggggatagtaatattgttagtgtgtttattaaggaggatttgggtttattattttagtgtagattttgtagataggtttggggaatgtaagttttatattttagggagatggatttagtattgttttttgtttgtttaggttggagtggtaggggagattttagtttagttagattttagtttaaagtgttatttgatagatgtttggttttaagttttttggtgggttttgttattgggggaaggaaaggtggaggggaggtgttgttgttattttaggtttggatagtttttttgggttttttttttttagtttagaggtttttatagatttagggtgggagattttaggttttttttgtagtttttgtgagtttagtagggattttgttttggggaaggggggtggaaggttggtgttgtttttattttttgtagttttgttgtttttagtgtgtaaagtagggatgagtttgtggtttttttatttttattttttatattttgtgggtttttaggaagttttttttattatattttttttttatttattgttttttttttttttttttttgagttgtagaaagagaggtgtaggttttagaggtttgtgtttttgttgaataggtataattttgaggtttgagtttttagttttaggttttttttttttaggtagggatggagatggagaattgatatggttggaaaggatgggttttgagtaatttttttttttgtttttaattatttattttttttatgaatgggaaaaagtattaatttttatgtttttttttttaagggttttaggggaggtagagagagttttttttttttttttttttgaaaatagatttttaggttagtatttttttttgtttgttttatttttaggtgttagtggagggtttggaggtagatttttttattgagtggtttggatgggggtaagtgttgaggtttggtatgggggaggagaggtgggaggatagtatttattttgggagttggggagtagttttttttaggggagtggtagttgggtgtgtggtattagtattattaggtttggagaagtttgggttggttgaggatgggttgagaataattttttggtaggggattgtttaagttgtgttttttattattgttattttatttaagtattaagagatatttgtatttttgttgttagaggggttttgaattgtttttagggtttttttttttttttttgtggtatttgtgattttttataggttttaggagggtttttgtatgtttttgagttggagggatataaggatatttttttttatttttaattaattgaagttagttaggttttttttggtatattttgttttttggttttttttttttaagggattaggttttttagagaggagatttagatttaggtaggaagtgtgtgtgtgtgtgtgtgtgtgtgtgtgtgtgtgtgtgtgtgtgtgtgttgtaagggaggatagtaaaaggtttagaagtgtaagttttggtgtggagagtaggggtattggtagatagttatttttgttttagattagaggggagtatgttggtttttttagtatgtgtttttgtaagtgtgagggagtgtgttttttttttggggaggagtttttttgtattttttttttggttgttgtgttatatttggaagtttgtgtaggagtttttttaagtttagagtttagtatagtttttttttatttggaaattataggttggtatttgggatgttgagagagggggagtgggaggggggttagagggggaagaggggagtttgttaggagttgggggaggagaggggggggaggtttgaatggtaggagttttaatggtttttagaagtgagtgtgagtgagtgattgtgtgttattttgtgtgtttgagtgtgtttttttagaggggtgggggtataggagtttttggagttttttttgttatattgttttaatgttttaagtttgtttattttttttatttagggagaattttttatttttgtttttagaggaaatggtggggggagtgttttttttgtttttttattaatttttttttttaatttaatttttaaattttaagtttattagaggagattttggggagaagggttggggttggagaattgaatgggattgagggggggttagattattttttggtatgttttttgttttaggtttattttttttttgggttatatatatatttttttttatttgttttgttttattgttttgttgggggattttttattatttgtagtgttagttggagttatttttgggattatttttattatatagttttttttatttttgtttgtttttgtttagtatttattttgttttgtttgttttagttaggatggtgatagatataattgtttatatgtagatatgtgtatgtgtgtgtatatatatatgtatatatatatatagagttatagatgtttgaattagatttttggtttatttttttttttaaagattttagtgggttgttttttttgtgtttttgtgttttatgtttttgtttttgggtggagttggttgtttttttgtgagttttagtttttaatttagttggaagtttttttttttttatatttatgtattgaagtgtggtgaggggggaattatagggaaataggtttgtggggtgaggggggggggttttgttgggggaatttttttttgagttttggagtagggtggagtttttatattttatgttattttaggggttgttgaatttgatagatattaggagtttttttgtgggatgggtgaggtaaggatttatttttttatttttttatttattagaaggttaggatttttgggtttaggtttattttttttttaatgttttttagttttatatttttaggtttttaggtgggaatggggttgttggagggtttgtttgtttttttagtttatgtttagagtttttgtgtttttagaggtgttttagttattttttttttttttttattttttttatttttgtggttgttaggttaagtaagggttttatttagataaagttttatatagaggatttatttgtggagataatatgttttagtttttttttttaggagggaggaaaggaggagggatggaagtggggtttttttttttgttgttttttttttttttgtttttgatggtgggttgtggggagaagaaagattttttttttttttattttttttttgggatttattttagtttggatagttattatagtaatagtagatatgtgattgtataggttttttatagttattatggtaattagtgttttttgtttttttggttattatggggatttgttatatggtttttttttaatttgataatttgtgggtttttttgattttttttttttgtataaggataagataatagttttagttaggggagattatgtgagaggggtttttttaattattatgataataaatttatattatttggtgatatatttttttgttgttatggtaatagaagaatattatatagtgatatattgttatgtttttaaggaaataagttttattttgagaagggtgaaagatttttttttttattaattatttttttatttagagtgttttaaattgttgtgtgttttggttttttttttgtttgtttatgtttatgtgttgtggaaggagagttgtatagggtgggtaggatgttatttggaagtaggttgaattgttaagggatttttaagaaggggttgatatgattaagagttgtgtatgaggttatttgggggtaggttttgtttgtaagaggtttttagtttgagtttgggtaaggtggggatagaaagaggggtaatttttttgtgaggttatttttgtatttttttttagttataagtagtttatttttgttaagggaaataaggtaggaagatttgaatggggatatatatttggtttttaggtagggagatttattgattggttgatttgtttatttatttatttagtttttttaggtattgattatttgttttgtgttaggtattatagtaagttttgtaggggatttaaagatgtattagaatgtttttgtttgttaggagttttagtttagtaggggaggttgataagtgtatagattattaatatggtggaattttgttattagaggggtttaagtagatgttttgggagttttttttttttagagatttattgtttttatatagagatatttatttattggggttttttttagatttttttttttttgtagaggagaggaggggatttgtatggggaaagtagattagtttttgagggtaattgtgtttttttttttttaaatgatggttttttttttgtttttttttttttagggtgatttttggttgaattttattttggggagagatttattgtattttggttttatttagaaaaataattttatggaaatagagtattttttattttttttttgttatttgtttatttttaaaaatttagaattttttttttaaatttttttatttttgtgagggggtgggggttagggaaattgtagtgtattaggatttttggggtattatggataggtggtgagtaggtatgtgagtttaggggagaagggtttgggtggtggagaagagataggggagggttgttaggggtttgagggatttatgggttatgggggagggtatgtggtttgggagttagaatagagatgggttatggttgggattagttgggaggaaggtttataggtttttgaatatttttgttggtttttttatgtttggttaaagtttttttattttagaagtaagattttatttgttttgggttttatagagtttggtttggtgggttatgttaggagttgttataatattttttttatttttattttttagggggtttttggttttttttttttaattttttgttttttgattttttttagtttttttatttttttttattttttttatattttttttaaagaaaataggatatttggttatttaattgtgagtttagtgtttggaattttttaaggtttggaggttgttttgtatatttttttgttgatgggttggaaatgagttattttatagaatttattgtatggaaagatttagggtttagaaagaattttttttttttgtttgttgttttggttggtttgggttggaagttataagtaggtgtgatggtggtaatggttttttgggggagggggtagatattgtttattttgtatggtttgggagttatgtttagtatggtgtttgatatataatgggtttttaatatttaaatgtgtgaatatgtttagtggttatttgagggtgttgagaggttgggaggttggtggtggaagagggagttttgggttttggtgttgtagtaggggggattgtagttgtggatgtttgttttatatttagtgttagggtggttatgataggtagttttgtttgtttgagtagttatggtgtgtagaggaaattattatatattaggagtttggaaattattgttttattttgtttttttgggtgatttttagtatatgattttggtatttttgggttttaatttttttgagttttggggaagaaaatgatttattttagatattttatagggttgttgtgagtattaattgtggtattgtgtgaaagtgtttggtaaattgtaaggtaggtataatttgattttaggtttgtataatatatttatatatagtattttatttgttttttatatttattttgtgaggtagggagaataggatttagattttgtagtaaatttatggtgtttggtatttttataggtatgattgatttattttttaaatggtttgtgtaaatagttagggtatttgtggtttgtttttttttatagatgaggaagttgggtttagagaggtgagatgattaaggtgggattttttttttttgatgaggagtttggggttgggggttggtttgtgtgtatgttagggttttggtattatatttgtttagttttagatggagttaggaggtaaatgaggaggaggtgttagggtggggttggggggttggttttagttttagttttggttagttgtttttttgattgttagtatt

SEQ ID NO: 266 - DNA, 12423 bp, Artificial Sequence
  chemically treated genomic DNA (Homo sapiens)
ggtattggtagttaaggaaatagttggttaaggttggagttgaggttggttttttgattttgttttaatattttttttttgtttattttttggttttatttgaggttaagtaggtgtggtgttagggttttgatatatatgtagattagtttttagttttagattttttattagagaaggggagttttattttggttattttatttttttggatttagtttttttatttgtaaaggaagataagttataaatattttgattatttgtataagttatttggggaataaattgattatgtttgtggaaatgttagatattatgagtttgttgtagaatttgaattttattttttttattttatagggtagatgtgagaagtaaatgagatattgtatgtgaatgtgttatataaatttaaagttggattatgtttgttttatagtttattaagtatttttatataatgttatagttgatgtttataatagttttgtgaaatatttggggtagattatttttttttttagaatttgaggaagttgaggtttagaaatgttgaagttatgtgttgaaggttatttgagaaggtaggatgagatggtggtttttaagtttttgatatatgatagttttttttgtatattatagttgtttaggtaggtagaattgtttgttatgattgttttggtattaggtgtaaggtagatgtttatagttgtagttttttttgttatagtattagagtttggggtttttttttttattattagttttttaattttttaatatttttaaatgattattaggtatatttatatatttaaatattgaggatttattatgtgttaggtattatgttgggtatagtttttaagttgtgtagagtggataatgtttatttttttttttaagaggttattgttgttattatatttgtttgtggtttttagtttagattagttaaaatagtaagtaggagagaggggttttttttaaattttgggtttttttatatagtggattttatggagtgatttatttttagtttattagtaggagaatgtataaaatggtttttggattttagaaggttttaggtattggatttatggttaaatgattaagtattttattttttttaaggaaaatatgagaagggtggggaagagtaaagaggttagaaaagattagagagtaggagattggggaaaggagattagagattttttggggaatggggatgggggaggtattgtggtagtttttggtatgatttattaagttagattttgtagggtttagagtaggtggaattttgtttttggaatgagaaggttttggttaggtatgaagaggttagtaggaatgtttaggaatttatggattttttttttagttggttttagttatagtttatttttgttttgatttttaagttatatgtttttttttatagtttatgaattttttaaatttttgatagtttttttttgttttttttttattatttaggttttttttttttagatttatatgtttgtttgttatttgtttgtggtattttgagagttttaatgtattgtagtttttttaatttttatttttttataagaataagagggtttaagaaaaaagttttaggtttttgggggtaggtagatgatagggaggaaataaaaagtgttttgtttttatggaattgtttttttgagtagagttggagtgtagtggatttttttttagaatggggtttagttaggggttattttggaaaaagggggataggaagggagttattatttggaaagggaaagatatagttatttttaagaattggtttgttttttttatgtaggttttttttttttttttgtagggaaaggggggtttggaaggagttttagtgagtgaatgtttttgtgtggaggtagtagatttttgaggaagaggggtttttaggatatttgtttggatttttttaatggtagagttttattgtgttagtaatttgtgtatttgttgattttttttgttgagttggggtttttgataggtaggggtattttgatatgtttttagattttttatggagtttgttgtagtgtttggtatggagtagatgattaatatttgggaagattgaatgaatgaatgaatgaattaattaattaataagtttttttgtttagaagttagatgtgtgtttttatttaggtttttttgttttgttttttttgatagaggtgaattgtttataattgggggaaggtatagaagtgattttatagaggagttgtttttttttttgtttttattttatttaggtttagattggaggttttttataggtaaagtttgtttttgaataattttatgtatagtttttgattatgttagtttttttttaagggttttttggtaatttagtttgtttttaagtaatattttgtttattttgtatagttttttttttatgatatgtaagtataaatggatagggaagagattaaggtatatgataatttgggatattttgaatagaggaataattaatgggggggggggttttttattttttttagagtagggtttgtttttttgggaatatggtagtatgttattgtgtgatgtttttttgttgttataatgataggaggatgtgttattaggtggtgtggatttgttgttatggtaattaaaaagattttttttatatgattttttttgattgaggttgttgttttgtttttatgtaggggaggagaattagggagatttataggttattaggttgggggaaaattatgtgatagatttttatggtaattaagggaatgggggatattggttgttatagtgattatgagagatttgtgtagttatatgtttattgttgttatggtgattgtttgggttggagtggattttaaagagggggtaggagaggggaggattttttttttttttataatttattattaaaagtagagaaaaaggaaatggtagagagaggaattttatttttatttttttttttttttttttttttgggagagagaattagagtatgttatttttataaatgagttttttgtgtggggttttatttagatagagtttttgtttagtttggtagttgtaagggtgaggaaagtagggagaggaggggggtggttgggatatttttaggggtataggggttttgggtatgggttgagaaggtaagtaggttttttagtggttttatttttatttaggagtttggaaatgtgagattaaggaatgttgaggagaaaatgggtttggatttaggagttttggttttttagtaaatgaggaggtagggggataggtttttgttttatttattttatagagaggtttttggtgtttattggatttggtaatttttagggtaatatgggatgtaggggttttgttttgttttaaagtttaaagggggatttttttagtagaattttttttttttattttataagtttatttttttgtggttttttttttattatgttttagtgtatgggtgtagggggagagaggtttttagttgaattgaaaattgaagtttatagaaaggtagttggttttatttagagatagagatatgagatatagagatataagagagatggtttgttggaatttttggaaggggaaataggttagaaatttgatttaaatgtttgtgattttgtgtgtgtgtgtgtgtgtgtgtgtgtgtgtgtgtgtgtatgtttgtgtgtgagtagttgtgtttgttgttattttggttgaggtaggtagggtggggtgagtgttgggtgggagtaggtgagggtggggggggttgtgtggtgggggtaattttaggaatggttttaattggtattatgggtgatggggagttttttagtagagtggtggagtagagtgggtgggaaggaatgtgtgtgtgatttagaaggaaagtgggtttggggtagaaagtatgttaaggggtgatttggtttttttttaattttatttaattttttagttttagtttttttttttagaattttttttggtgagtttagggtttggaaattaaattggaggagggaattgatgaagagataggaagaatattttttttattattttttttgaggatagaaatggagaattttttttaggtaagagaaataggtagatttggggtattgggatagtgtggtaaggaaggttttagaaatttttgtgtttttatttttttagagggatatatttagatatatagagtgatgtatagttatttatttatatttatttttggaagttattagggtttttgttgtttaggttttttttttttttttttttttgatttttggtaggttttttttttttttttttggttttttttttatttttttttttttggtattttaaatgttagtttgtgatttttaaatgagaaaaagttgtgttgggttttgagtttggagaaatttttatataaatttttagatgtgatataatagttagagagggaatgtggaggaatttttttttgagaggggagtgtgtttttttatatttgtaggaatatatattggaaaggttagtatgtttttttttgatttgaggtaggggtgattgtttgttagtatttttgttttttatattaaagtttgtatttttgagttttttgttgtttttttttgtaatatatatatatatatatatatatatatatatatatatatatatatatattttttatttgggtttagattttttttttaggaaatttggttttttaaaaaggagaggttaagaagtagaatgtattaagaaaagtttaattagttttagttagttgggggtggaggggagtgtttttatgtttttttggtttagaggtgtatagggatttttttgaagtttgtggggagttatagatattataaagagaaagagggaggttttggaggtagtttagagtttttttggtagtaaaaatataggtgttttttggtatttgggtaggatggtagtggtgaggggtatagtttaggtagttttttgttaaaaaattgtttttaatttatttttagttaatttaggtttttttagatttagtaatgttgatgttatatatttaattattatttttttgggggaagttgttttttaatttttaaggtgagtgttgtttttttatttttttttttttatgttaggttttaatatttgtttttgtttagattatttagtgaaggagtttgtttttagattttttattagtatttggagatagggtaggtgagaagagatgttagtttagaggtttgtttttagggagaggggagagaagagttttttttattttttttgggatttttgagaaggaggatatagaggttgatgtttttttttatttgtggaaggggtaaatgattaggggtagagaggagagttgtttggaatttattttttttagttatattagttttttatttttatttttgtttgggagaaaggggtttggggttgggggtttaaattttaagattgtgtttatttagtaagaatatagatttttgaggtttgtatttttttttttgtagtttagagagaaaggaagaaggggtagtggatgagaagaggatgtgatgaggggagttttttaaagatttataaggtgtagaggatgggggtgggggggttataagtttatttttgttttgtgtattagaggtagtagagttgtagagagtgagggtggtattaattttttattttttttttttaaagtagagtttttgttaggtttataggggttataagggagatttggggttttttattttgggtttataagaatttttgagttggaaggaaggagtttagagaagttgtttagatttgagatggtagtaatattttttttttattttttttttttttggtggtaggatttgttagggagtttggggttaggtgtttgttaagtggtgttttgagttagggtttgattgggttggggttttttttattattttagtttgggtagatagggagtagtgttaaatttatttttttggaatgtggggtttgtattttttaaatttatttgtggagtttatgttggggtggtggatttgagttttttttagtgaatatattgatagtattattgtttttttaagatttttgtgggtttgtagttttttatatttggtttgtaggagtattttttatttgtgaaaggggaggagtaatttggattagtttaattttattttttatttgttaaaaaagtttttgatatagtttttttttttataagaaaaatttagtataaaattttttaatttaattttaagtattttgtattgaatggagattgggtaggaggtatttgtggtattgggttttagtggaaaggggttttatttttagttttgggggtagatagtttttttttattatattttgtttttattttgtgtttttgatattagttgttgttggaatttttttgttgtgtttttaatttgtgaggtggggggtgaggtgggttaggatttggtttttgttttttaatatttttttttaggttagtaaaaattttagttttaaggattaggttgggggattagattttagaatttgttgtaaattttggggtgggggaaggagggaaatttaggagattgtggtttttttttttttgtttttgtagttttttttttattgtttttatttattttttattaaatttggaaattaaatttagtttgttaattggtgtgggtagagtatagtttttaggtttttgaagttttttatatttggaggatgatgatttttttttgattatatttggagggtgtttagttgtgagttagtggggtatagttttttttttttggtttggatttttatttttttaatttaggaagattgaggtgtgtgtatgtaggtggggtaagtttgggttattgatgagatttgtttgtgtttttgtttttattttggtgtttttttttttttttggtagttttttttttatttgtttattttttgggtttattttgatttatttggtggtgggttttttttttttttgatttttggtggtgtggtttgttttttttttgattttgtgtttggttgttgtgttttgaaggatatgggttatagattgtgtggagatattagttttgtgggtggttgttttggtttaagtagaagaaaattattggggttagtgttgggtatggtagtttttttgttttggagtttgtgttgtttgggtttttttttgttgattttggttttggttgtttttggtttttgataggttgttgagttgtatgaagttttggggttgttttgattttttggtgtttgttttatttttttttttgtttattttttggttagttggggttttgggtgatttggagaggggtaagtggtgttttttagaggaggtgtttttatgtaatttgggggttttggtgggggtatatttggtgggttttagggtgtaagttgagtttttgggagggttagtttagtttagttttttttgtttgtaggggtatgttgtttgtggggtgttggggtgtagggaaattttgtttggtgtgagttttgttttttttgtgtttttggggttttttgggttagttggttggtttttttttattttgttttggtttttttgttttgtgtttaggttttggttgttggatttggtgttatttttggtgaagttgttttgagagggtgaatgaaaaggggggtagtggtggagggtgggggtttggggaggggtgttttttttttttgtggtgtagttggagttggatttaaggggttagtattgttttggttttgtgttaggtggtgggggaggggaggagggatttttttaggggtgggtttggagggggtgggggtggtttttttttttgttttgttgtgggtttattgtttgggaggggtggggagatagtggggggtagttttgggtgggagtggaggtggagatgttgttgttgtagttgttgtggtggttgttgttgttgtagttgttgttggtgttatagtttttttttttggttgagatgtggagtgagtgagtgaaagtggtggtgaggagttttgtgtatattatagttggattttttattttaattttaagttttggttttgtttttagatagttttgtagttaattgttggatgttgttggttttgagttgtgtgtttattggttgtttgttgtggtagtgtgggtgggagtgtagggagagaattatagttggaatttgatttttattttaaaatttaggattgttttttttttttttttttgtttttgggtttgtttttgaaggttggagttaattagattgttgtttagattgaatttatttttttattggttattggggtttttgggatttttttggagggagtttgaagaattagagtatttggtgtggggttttggtgtagggttgtaggttttaggtattttttgtttatgatttttgatttgggtagtagttggaggatggagtttagttttgggtgggtttggggaagaaaggagataggtggtatgggggtgagggttgttattagggggttttagagtgaaattttaggtttttatttggttaattttttattttggagttgagtttggttgtgggattggggaagggaaggagtggagttggatgttttgggggtggggttttaggttggaggggtttagttttggagaaatgggtggagtttgagaaaggttagggtaggtatggtttgggtgtggtttttataaattttttgggtttattggttatatttttgagttaattttgagattttgattttgattttgtaattttaatttgttggatttgattttatattgatgtttttgggttttatttttttgtttttagggattttttgaagggtgtggattttatgtaggggttttgtgtttgaatatgtggttttaggtaggttgtgttggattgtagagtttggatttttaggaggggttgtggagtagagtgaggatttttaagaaggaatttgtgggggttttgagtgtgtgggagggggtggaagtatagagttgggttttattgatttgatttttaaagtttttattattgttattttttaattttgtgttttagttttttttaagtttttatgtggtttagggaaggagtgtttgtggaattggaattttgtgggtttgttgtttttatttatttattttaattttattggtagtgggtttttgtgggtttgtgttttttatgtgtgtatatgtatgtgtagattttggtttttgttttgtttatttttttgagttttggggtttagttggttttagtttttttttgttgttggtgttattttagaaagttgtgggtatttgggagtggagtgttgtgggtgtgttgggtgttggtggaggggggaatagtgaggattagatgttgggaagtatttttttaatatttgtgagaggtagatatggtggaatttagtgggttagttagttttttttttggagattttggggtgtttgtgttattgtggagaggtggtgggatgggttggatgatttttattattattttttattttgttgaggttattatttttgggtgttgtttatttttttaaggttgtattatttatgtagtttttgtgtattttttgttattgtagagggttggggttgttttagtttttgttttggttgatggggggaggggatgggggaagtggtagagtggttgttgtgttgttgtttttttggttgtttttttgttgaatttatgtatagagttgtgtaaatgaggttgggtgggtttatttgtattttatgttaatgagtagattttttaagtgttttttttttttggtgggagtttttgtttttattttgagtatgtggtgtttgagttttgaattttgtgttgttttttgggaaaggggggttatttatggttgttttgtgtgtttgatattttttttttttttgagaggttgtagtttgttgggttggtttgttttttttgttaggatagaggttttggggttggtgtgagaagtagggatgtttaatattttttttttgtagaggggaaaatgaggatagagaggttggtttagtttaatgattaggttttttggtggttagtaggttttatatttttatttattattttggttatttttgggttttggattgaattttgttttagaatatgtttgaaaggagggtaggtataaatgtattatttagataaattgagatttatatgtatttttttgggtttaggatttaggggagattggttatgtaagataggatttgatttttgtatttggtatgttggggttgatggttagttggagatgtttatttttagtttgagtgttagagaggaggtagaggtagaatttatagggaaggtaaagaagatttgaaattatttttatttaattttagttttttaagttttagttttgatattatttttttagagtggttttttttttagtaagtattttaatgttatttaagtgttaaggtgtttaggatatagtattgagttagatataagtttggaattttatagtatttagtttaggttgggattatatgtttgtgtttgtagtaatgaaatgattatttttttatttaggttttgtgtttttagaggggttatgtttattttgtttattagggttttgtttagtgttgggtataaagttgttaggtgaatgaatgattttaggtagggaaagggaaataaagggataagaaatttttttttttgggttttagttttttaataaagatattaagtttaattaagagtttttttgggtttgaggaagaattttttttatatatattttgtttagttagtttttttagttttttttagttttgtttttattttttttttatagtttatttggttttttgtggagttaagataatttttttatttgtgatattttttgtttagggatgatataattattattttatttagttattttaatagttttgagagttgggtggatggttttttattttttagataaggaaggggggtgtttagaatgatgaagttatttaagtgattgtttagatggtatggttttgtttttagtgattttggtttgtaggtgttttgttggtagaatagggtgtatatttaagagggattagtaaaggggaagggatgttgtaggaatttttataattttgtttttgagtgagatttatgtgggattttgttttttttagaaatttgagtatttttgggagaattaattttttaaggaggtaattttttttttttaatttatttatagaattttattattgtgtgtatattttattttaggagggagagaggagttgttgagtagaaagtagattggttgtagggatagaagatattaagggtatttttttttatagttgtgtttggattttttgtgagaagaggaagttttaggggtttttattgtatttttaagattttagagagaaatagaagtgttgaggggttgtaggtaggttttttattttttttgggttttgaatatttatttataggaggttgaaggtaattgttttgtaatttatttatgagggttaatgggatgatagtggtaagaggggttggtatattgtttagattgttttaaagttagggttggggttgttaaaaaggttatttgtgttttattatgttttatttttttttttttttatttttttaggttgggttttatttgtttagttttttgattttttggtaaggttgagtaggttttagttaggaaggggttagttgattttgttggttggagtattaattttttttagatgggttggtggtttgtattgagggtttggttgtttagatagagttgattttggttttagtgattatgtgtggttatgtgtgattgtgtgaagggagtaattttatttagttttttggtttttttttgttttatttttttttattgttgatattttttataagtagtggttttatgaaggtttttttgtttttagtagttttttttggttttttgtgttgtttagttggagggttgaggatgtttggtatagttgatttttaaaggttttagagggatagtttttttttttgttttttttattttgttagttttattattttgtatttgttttttttaaagtatgtgttttagtttttattttttaatttaaggaagatgtatgtgttaaggataggatttaggagtattttttaatatttaggggaaaggatgaggttataggaaggttttttttgtagtaagaaggatttagataga

SEQ ID NO: 267 - DNA, 3720 bp, Artificial Sequence
  chemically treated genomic DNA (Homo sapiens)
tgtagttgtttattaaaattttatatatattttggtatataattatatttgttggaatttattttatagatatatttatatttatatagttaaggatgttgattttaataatattggtataagtaaaaagttggaaattgtttatatgtttatggataggggataaattgattaatttaaggtttttttttataatggagtattatatagttttgaaaaagaatgataagatttttatgttaggatatggtataatttttaagttattttaagtgaaaaaataataataataataatattgtagaataatgtgtatggttggatatatataaatttttttgaaagaatatttaagaaatttaaatgtggttattttaggagttaggaatgaggtaggtggagaggagggatttttattttttaatttagaatatattttgttgtgttagttgattttttttttattgttaataagtattatagttttttttaatttaaattattttttttagtataaatttaaaaaaaaaaaatttaaaatggaaaaatatataggtgtgagtaaaagaaatgaatggtaataatttttgtggtttattgagtgtgtttggatatttatgtgtttttagtttttttttataggaaatgtataggtgagaaattgatgttaagggggattgagtgttaagttagttagtggtagagggtagatttaaatttaatatggtttttttttgttgttttttggtttttgtttttaggtgggaagtgtatttattggatggttggtttggtgaggtgtagtgttttagattggtgtatttgtggttttagtgttttatgtttggggagtgtgtgtgtatgtagtggtgtgagtttggtggtggtggtgataataataatgttatagtttgagtttttttttttggagtttttggtatatattttgtgtttatgtttgggtatttatgttatggtggtagggttggggttttttaaaatggtagtggtttggggagttggaagtttggagttagtgttgttgtagttatataagtgggggggttgtgggttgggggagtttggtagtgttttggagaggtgaggagttgttgtttgaggttggtgtgggtgagtgagggtgttgtggttttttgattttttttttagaggtgagtgtttgaagttaggagtttggtgtttataggtttgtgtgttgtggggaatttttattgttagtttttttgttatttgtgtgtttttaagtttagtgggtgaggttttgggtgttttatagttggtgttgtgttatgttttattttagtgagttttttgaatttgatgtgttttttgttaagtttattgaaggttgttgtgttgaatttagtgttgaattgttttggttgtttgttagggatgtttttgtggttattggttattttggaggtaaggagggtgagtaggggtgtttagatgatgatggtgtagtgtgggggtgtattatatttgagaattaggagggattgggatattggagttatgagaataggggtgatgggaagtttaggagttttggggtgtgtatttttatttttatttatattgggttgttagtgtttttgtaggaatttgtgtggttattggagtgtttttttgtttgtgtatgtgtgttttgtgtgtgtatgtttttatgtgttttttgggatgtatgtgggtttttgttgaattagaatgtgtaaaaggtattttgtgtatatttgtgggtattaagagttttgtaggtaggggttgtggatttaggtgtattttttgatgtgtttagagttgatttttgttttttttttagtaggtgattttttgagttgggttttgaatagttgtggtgtaagtggggatttagttgatttttgttttttggaggggtttgtgtttatatttttttttggttttagttatagtggtagtttttttatttaggtagtgtttgaatatttgtatgatttggaggtattttttaattttatgttgggtgttttaggtttggtatttttttttggtttagaggtagtagtgtttagatttttgttggatgtttttttttttgtggggtttgatgttttgttgttgggtttgttggatttttattttttggatttgggtgttgttttttttttagaggtgttttgggaggttttgttttgtgtgggtgtttttttgtagtgtttgtatgagttttagttttttttgtttgatgttaagtttggtttttggtggttttttgttttgttagtgttggatgttgtttttgtttttaagggtttttatgtgttttgggagttgttttttgtgggggttttagggaattgtgggttatagggagattattaggttgttttggaggtttgtttttttgtaatagggattaagattgaggatttgttgtttattagttgttttgtggaattgttggttgttttagttaatagattttattttagtggggtttatgatgtttttttgttggttttgggtgatttaggggagggggttgagggtttttttgggtttttgattttttttagtggggagggagggagtagtggtgatggtggagagtttttggttagtatgtagttttagttttttttgttgggtttttgtagtgttgttgtggtggatttttttaaatttttggtggtggatatttttggaagtagtggtgtggttgtattatttgtgttgttgttgttgtttattttttttttttaggttaaggtgtgatgtaaggggtgttgtggtggtaaatgtagtatgtgttgtttttgtttgtggttgtatgttaaggtttttgtttgtttggtggagagttgtgtgtggagttttgtgtgttttgatgagtttaattgttatttgtgtatttatatgggttataaatttttttagtgttgtatttgtttttgtaattttagttgtagtgattattttattagttatgtgtgtatttatattggtgagaagttttttgtttgtgatgtgtgtggttgttgttttgtgtgtagtgatgagaagaaatggtatagtaaggtgtattttaagtagaaggtgtgtgttgaggagtggtttaagggttttggtttttatttgttgggttttttttttgtttttttttgagtaagagatgggtttatgggttggggtgttgttgtttggtgtgtatgagttttgggttgtttttttttttgttttttttttaatttttttttgtatgtttgagggttggtttttgttttgtttttagtttttttgaagtgtttgttgtatatgttttatttagtattagtttgttggatagtttttgtggtttaggtgttgttatttttgttagttgtgttttgggggaagttttttgagattatttagtgaataggtattattttgggatttaagatagttttttgtaattgtatatgttttatgtttttttttataatttttagagataggttggggtaggttaaggtggttttgtgtgggattttgtatagtagtgttttatttagtagttgattggatgtaatgttttgttttgggttttttttttttttgttgttgttaatttttgtaaagtagatgttatttttaagtagttgataaaattgtttatttttgtaattaaaattattgtgttaaaagtttattgaatttgttatgtaagttttt

SEQ ID NO: 268 - DNA, 3720 bp, Artificial Sequence
  chemically treated genomic DNA (Homo sapiens)
aggagtttatatggtagatttagtaagtttttagtataataattttaattgtaaaaataaatagttttgttaattgtttgagagtagtgtttgttttataaaaattaataataataaaaggaaaaaaaatttaaagtaaaatgttatatttaattggttgttggataagatattgttgtataaagttttgtgtgagattgttttggtttgttttagtttgtttttgggggttatagaggaaggtgtggggtgtgtgtagttataaaagattgttttgaattttagggtagtgtttatttattgggtggttttagaagattttttttaaagtgtggttgataagggtgatagtgtttggattgtgggaattgtttggtgagttggtgttgaatagggtgtgtgtggtgggtgttttaaggaaattggaagtgggatggaggttggtttttgggtgtgtgaggaggagttggaagaagagtggggaggggaatggtttggaatttgtgtgtgttgaatggtggtgttttaatttataaatttattttttgtttagagagaagtgaaggagaggtttagtgagtaaaagttgaggtttttgagttgttttttggtgtgtgttttttgtttgaggtgtattttgttgtgttgtttttttttattgttgtgtgtgaagtggtggttgtatatgttgtaagtaaaaggttttttgttggtgtgggtgtgtatgtggttggtgaggtggttgttgtggttgaagttgtggaggtagatgtggtattggaagggtttgtggtttgtgtggatgtgtaggtggtgattgagtttgttggagtgtgtaaagttttgtatataattttttattgggtaagtgaaggttttggtgtgtggttgtgggtagaagtagtgtgtgttgtatttgttgttgtggtgttttttgtgttgtgttttggtttgggggaaaggggtgggtggtggtggtggtatgggtggtgtagttatgttattgtttttagggatgtttgttattagaggtttagggaagtttgttgtggtggtgttgtgaaggtttagtggggaaagttgaggttgtgtattggttagaaattttttgttgttgttgttattttttttttttttattaggaggggttaggagtttagggaggtttttagtttttttttttaagttatttggggttagtgggaaagtgttataggttttgttgggatagagtttgttggttgggatggttggtagttttgtagggtagttgatggatagtaagtttttaattttggtttttattatgggaaaatgagtttttggggtggtttggtagtttttttgtgatttatagttttttggggtttttatagaaagtagtttttagggtgtgtagggatttttgaaggtagagatagtgtttagtgttggtgaggtgggaggttgttggaggttgggtttgatgttgggtggggagagttgaggtttatataggtattgtgagggggtatttgtgtaaggtgaggttttttagaatgtttttgggaaaggggtagtgtttagatttggggagtaaaggtttggtggatttggtagtaaggtattggattttgtaggaaaaggggtatttagtggggatttggatgttgttgtttttggattggggaagggtgttaggtttaagatgtttgatatgaggttgaagagtgtttttgggttgtgtgggtgtttgggtattgtttgaatgaagaagttattgttgtagttgaggttgggagggggtgtgggtgtaggtttttttaggaagtaggagttggttaagtttttatttgtgttgtagttgtttaaagtttagtttaagaagttgtttgttgaggagggagtaggaattagttttgggtatattaaagggtgtatttgagtttatagtttttatttataaaatttttggtgtttatggatatatataaagtgttttttgtatattttgatttagtaggggtttgtatatgttttaaggagtatatagaaatatgtatatgtaaaatatatgtgtataggtaaaagggtgttttgataattgtataggtttttgtggaggtgttggtggtttagtgtgggtgggaatgggggtgtgtattttaggatttttaagttttttattgtttttatttttatagttttaatgttttagttttttttggtttttaggtatggtgtgtttttgtgttgtgttgttgttgtttgagtatttttgtttgttttttttatttttagggtagttggtggttgtgggagtgtttttggtaggtagttggggtaatttagtgttgggtttggtgtaatagtttttagtggatttgatgaggagtgtgttgggtttggaaaatttgttaaggtggagtatggtgtggtgttggttgtggggtgtttggggttttgtttgttgggtttgggggtgtgtgggtggtggggaggttggtggtaggggttttttgtagtgtatagatttatgggtgttgggtttttggttttgggtatttatttttgggaaaggagttggggagttgtggtgtttttgtttgtttgtattggttttgggtggtggttttttgtttttttaaagtgttgttgggtttttttagtttatagtttttttatttatatagttgtggtggtgttggttttgggtttttgattttttgggttattgttattttgggaggttttggttttgttgttgtgatgtaaatgtttaaatatggatataggatgtgtgttggggattttgaaaaggaaagtttgagttgtgatgttgttgttgttgttgttgttgttaggtttgtgttgttgtgtgtgtgtgtgttttttaggtgtggagtgttggggttgtggatgtgttagtttggggtgttgtgttttattgggttgattgtttggtagatgtgttttttatttggaggtagaggttgaggggtagtaggggaggattgtgttgggtttgaatttgttttttgttattaattagtttgatatttagttttttttaatgttagttttttatttgtgtattttttgtggagagaaattgagagtatataaatgtttaggtgtatttagtaaattatagagattattgttatttattttttttgtttatgtttgtgtgtttttttattttaagttttttttttttaaatttgtgttaggaaaaataatttaaattaaaaaggattgtaatatttgttaatagtaggaggaaagttaattagtataatagggtatattttaaattgaaaagtaaaagttttttttttttatttattttatttttagtttttgaggtagttatatttaagttttttgggtatttttttagaagaatttatgtatatttaattatatatattgttttgtaatattattattattattatttttttatttgaaataatttagagattgtgttatgttttgatataaagattttgttatttttttttaaggttgtatagtattttattgtaagggaggattttgagttagttgatttattttttatttatgagtatgtaggtagtttttaattttttatttatattaatgttgttggagttaatatttttgattatataaatgtgaatgtgtttgtgagataaattttaatgagtgtaattgtgtgttaaagtatatgtaaaattttgatagataattgta

SEQ ID NO: 269 - DNA, 8759 bp, Artificial Sequence
  chemically treated genomic DNA (Homo sapiens)
tagtttggaagagggtagttaggggagaagttagggttggagttatgagaaaggataagatgagatgatggttttaatattgaggatagaaagaatattgagatgagaaagtagtttattataagtatttatgtaaaggaaatagtagatgtttataaattagtagaggtaataattttgaaagtttatttataagtttttttttttatttttaatttagtttaaatgtaattatttaaattgttttttatttttttttttggattatgaatgagttttttaaatgtagggtttatagtgttttatttattagtgaattttaagtgtttagtatagagtttggtaaatagtaaatgtttaataaatatttgtttagtgtatgaattggagtgattttttattttgtttataagttgaaaaaaggtttattatatatttaaatatgttgaaattatagggtatttggtaattttttaaaattaaaatttttagtttggaaatagaattttaattttgtgaaaataaaatttatttatttatttaaaaaatatttattaaataatgattatgttttatattaggttgagttttaaggatttaatgatgaataaaaattaatatgatttttgtttttaggaaatatatagtttagtgaggaaaatagattgtgagaagttttttaataaatattgggtgttattaaaatatattaaaaggtgagtgggtgagggatttgagttagtttaggtggtttaggaagtttttttggatgtgttgatatgtataggtattaattagataaatagagagaaggatgaattaatattgtaggtagagggaatagaatatgtaaaggtaggaaggattatggagttgttggaggatttgaataaaggttagtgtaagtggattttagaaaataggaggaaaggtgtatgagatgagattagagaggtagattatgtggggtatggttaatgttttggatttttttattaagagtaatggggagatagtgataggatttaaatggggaaataatatgattagattaaattttttaaaaaattttttatgtaaatatatattgagagttaattattgataaagatttaaaggtaataaagtggagagagaatagtatttttaaaaaatggtgttaaaataataggatatttatattaaaagttgggtatttgtttataaaatttaatttaaaatggattatagatttaaatgtaaaattgaaagttatataatttttggaagaaaatatagatgggaatttgtgtgattttgagtttgaaaatgatttattatatttgatattataatttgtaagttaatataatttataagtgaataaagtgatgaattggattttattagaatttaaaatgtttgtgttttaaaagatattggtatgataatgaagataaattatagataagatattgttgaattatatttttgataaaggaattgtgtttagaatatataattttaaaatttttataataaattataagtagtttaattaaaaaaaaaaaaagagaaaaaatttatagtttttattaaagaaagtatataattgtaaaataagtatatgaaaaatgttttgtatttttatttatgggagaaataaaaattaaatgggaaagatatttttaattagaatattaaaattaaaaagattgattatattaagtattggtgaagtggaaatgtaaaatgatataattatttaggaagatgatttggaagttttttataaaagtaggtgtatatttattttgtgatttatttattttatggttaagtatttatttgagagaaatgaaagaatatatttatataaagatgtttatataaatatttatagtagttttatttgtagtagttttaaattgaaaagaatttaaatgtttattaaaagtgaatggataaataaagtgtggtatagtaatgtaatagaatattatttagtaataaagaagaatgagttagtgatatatataatagtttaaatgtatattaaaggtattgtgtttagtgaaagatgtaagtaaaaaaaaaaaagagtatatgttgtatagttttattgatataaaattttggaaagtgaaaaatagtttatattgatagaaagtagattattggttgtttgaggaggaggagtataggagaggtggagggaaaatgtataaagtggtataataaaaatttttggaattatagatatatttattattttgattgagtgatgattttatgagtgtatgtgtgtgttaaaaatgattaatttatgtaattttaaatatgtgtagtttattgtatatattaattatattttagtatggttattaaaaagaaattttttggttgtataatgtagaattgattttaggaaagagtggagggaggatgattatttatagtgttttaggtggaagagaatggtgttttttggaagtgaattaggttggtaataatagagatgaaataaatgggtagatgtgtgagatatttaggaaataaaatttgatggttattattttttaaaggttagtttattttggttttttagagtaaagagttagggaagattttattaataaattttttttgaagttgtagaggaagtttatagtagaaatttatttttaatttgattaatttgagagaatatttttggttttatttgattattaaaaaattgtaaagaataggaggagaaagaagaagaaagttggtataaatagtgaatttatataatattaattaataattgttttttgtttttaaaagtaatgggaagaaaatgagatttgagttggaagattagagtttaaaatttaaataaagtatatggttttaatatgtttatagtagttaattttttttgataatgatataattgttgatagtattatttttaaaaataaaaataatatagtaattttttagatttgtagaatgtttttttgtttataagtttgttttatatatattatgttttttaaatgatatattagttttttgagggtaatttatattggtaatagtttttagatgtggaaattgtgaagataatgttggtgatgtggaagtaatataaattttggagttttttagatttaggtttgaatgttagattgttttttatttagagtaattttagagtattattttttattttaatttttttttaggtttttttgtgtttatgtgttttttttatttttgtttattgtttatttagtgatttttgtatttttttttattgttagtgtgtagatatatagtttttttggttttgagatttatgttaattttattttattattttgttagtttatttaatttttattgagtaatgttagttgaaagttgtggtgggattaaatgttgtaatgagtatttaaatgaggttgaagtatttatgtattttatttatatatggtgaggtatatttaaggaaggttgtagttattaaaattttaggaaataattttttatttttttaggtgaaagggtttttaggtttttgtgttttggaaggtttatttatagttattttttaaatgataatgtgattgatgagtttagagtttagtttaaatagtaatggattggaagattagtttaggttttattaatgtggaatatagaataaattatgtttttgttttagtttgtttatttgtgaaatagagtttattatatttagttttttttgtttttaggtttgagttattttttttggttaaggtaagtaaatgtttatgatgtttggttgtgtataagataaagttataataaagttataatttattttttttttgtagaagattgtaaaaagtaaaagagatttaggtaaaaattttggaatgatttttggaatagagagtttttttagaattagaagttaaaggaatttaaaatatagggaggtttagggtttttattgatataaaggaaagatgttttttttataggtttatgtttatattttttttttttttttatttttatttgtatttttatttttatatagggtttatgggattttttttataaaagagtagttgtagtaatttatattattttttatgtttggttgtttattaagaggtgaaaagtagttttatataggttttatttttggatagttttagttgtaaagtttaaaatatgtgaaggtaatttggaaaagtaagtggttgtatataaagtaaatgtttatagagttttggataaaattgagtgtttatgtgtatatggtaagtgtttttagtgtttgtgtgtttatttgtttgtttgggtgattttgtttttgagagtttggatgagaaatgtatggttaaaggtaattttagataggaagaaaggtagagaagagggtagaaatgatttttgatttttggggttgagggtttttagagtaaatggtataatgttatgaggtttgatttatttttatgatggaatttaaggttttagtaagtatttgttggtttggttatggtttgttttttagtttgtaggagatttttttatttttttatttgtgtgtttttattagttttgaaaagaatttttggtagttaggagtaggtatttttattgtttttttttttttttttttgtttttattttgttggttttttagattgggttttggaattaaatttggtgagtgttggtttttaggaaatttggagttttggtgtttaaattttggtttaggaaagtaggagttatttaggaagtaggggttttttagggttagagttagttttttttgtttttgtttatgttgtgttagtatttgtttttttaaagttattaggtaggtgttagtgtgtggtgaggggaggggagaaaaggaaaggggaggggagggaaaaggaggtgggaaggtaaggaggttggtttggtgggggtgggatttgatttgtaaattgttgtatttgttttttattttttagtgttttttttgagattttggggagttagtttgttgggagagtgggatggtttggagtaagtttagaggtagaggaggtgatagagggaaaaagggttgagttagttgttttagtgttgtataggagttgaagggatgtattatgttagttttagtttggttttagtgatagttaatgttttttgtagtgtggtggttttgaagttgttgtttggagttgtttttttttttttggtgaagtttttaaaagttgttaaagatttggaggaagtaaggaaagtgtttggtaggattgatggttgtttttgttttttttttttttattttgtttttttttattttgtttttttttttttttttgtttttttttttgtagttgttttagttggttatttttagttaattttttttattatttttttttttatttgtttttttgtttttgttggtttagtgttgttagtttgagtttgtagagaggtaattttttttggttgtgagtgggtgagttagttgtatattgtaaagaaggtttttaggagttaggtgattggggagtggttttagtattgtagttatgatttgtttggttaggttgtatgtggagagaattttttgtttttttttattttttttttatttttttttgttttttttattttgagtgtggagttagagattaaaagatgaaaaggtagttaggtttttagtagttaaaaaataaaataaataaaaataaaaaagttgaaataaaagaaaaagataataatttagtttttatttgtatttattttagtggatattgaatttggaaggtggaggattttgttttttttttttaagatttgggtattttttgaatttattttttaagtattaagagatagattgtgagtttagtagggtagattttgtttattgtgtgtttttttttgtatgagattttgaggttgttagagtgttttttgtgtggttgtttttgtaagtttttttttttggagttttttgtaggtgggtagttagttgtagtgattattgtattattatagtttgttgaatttttttgagtaagagaaggggaggtggggtaagggaagtaggtggaagatttagttaagtttaaggatggaagtgtagttagggttgggaagggtttatttttggttgttgtttaagatttattgaggagttttttagaatttgttttagagtgtgtgtgaagtgatttagaatttgggttttaggtatttagaggttgtgagtgtagtattttttggtgttagtttgttgttgttgtagtagtagtagtagtagtagtagtagtagtagtagtagtagtagtagtagtagtagtagtagtagtaagagattagttttaggtagtagtagtagtagtagggtgaggatggttttttttaagtttattgtagaggttttataggttatttggttttggatgaggaatagtaatttttatagttgtagttggttttggagtgttattttgagagaggttgtgttttagagtttggagttgttgtggttgttagtaaggggttgttgtagtagttgttagtatttttggatgaggatgatttagttgttttatttatgttgtttttgttgggttttattttttttggtttaagtagttgttttgttgattttaaagatattttgagtgaggttagtattatgtaatttttttagtaatagtagtaggaagtagtatttgaaggtagtagtagtgggagagtgagggaggttttgggggtttttattttttttaaggataattatttagggggtattttgattatttttgataatgttaaggagttgtgtaaggtagtgttggtgtttatgggtttgggtgtggaggtgttggagtatttgagtttaggggaatagttttggggggattgtatgtatgttttatttttgggagttttatttgttgtgtgttttattttttgtgttttattggttgaatgtaaaggttttttgttagatgatagtgtaggtaagagtattgaagatattgttgagtattttttttttaagggaggttatattaaagggttagaaggtgagagtttaggttgttttggtagtgttgtagtagggagttttgggatatttgaattgttgtttattttgtttttttataagtttggagtattggatgaggtagttgtgtattagagttgtgattattataattttttattggttttggttggattgttgttttttttgttgtttttttatttttatgtttgtattaagttggagaatttgttggattatggtagtgtttgggtggttgtggtggtgtagtgttgttatggggatttggtgagtttgtatggtgtgggtgtagtgggatttggttttgggttatttttagttgttgtttttttattttggtatattttttttatagttgaagaaggttagttgtatggattgtgtggtggtggtgggggtggtggtggtggtggtggtggtggtggtggtggtggtggtggtggtggtggtggtgaggtgggagttgtagttttttatggttatatttggtttttttaggggttggtgggttaggaaagtgattttattgtatttgatgtgtggtattttggtggtatggtgagtagagtgttttattttagttttatttgtgttaaaagtgaaatgggtttttggatggatagttattttggattttatggggatatgtggtaagtttttttttttagaaatgttgttttttggtttagggtagagttattttgtgttttggggtatttagtggtttttatttgtgtgaatatttagattgtttttgggagagtttagtagggtaaatttagagtttttttgtggatttttggtttgttagaggtttaatttgagtttttttaatttttgttgtgtgttttgggtgttgatttttgtttttttagattttttaatttttttaattgttttaaatttttattattttttggtatttgaggttttaaatagaaattttattgtatgggttatttttagagataaagtttttaagttttttattttttttttttttttgtttttaaagtttgagaattttaataggaatttgggtaattttttttttttaggtttgttaggattttatttttagtttgtgtagattagagttaaaaagattggtttaatagttttttagtgggtattttttagagaggtaaagtgaaatttttggttagggaaagaaagtggtttttgggtgttgaggtttgttgtgtgaaagggtgaattttttttttttgaagtaattggggatttgttttagggttggaggttagtagagataatttaaattgttatgtttagagtaggtagaggggtaatttttttggtaaagattttataggatttgtatttatagttttttaatgttggttgattatgttgaaagtagttgtttgggttggtttttttttgtaaagtgtttattttttttgtggattataatagatttatagttttttattttaggtttgtattagatttataaagaggagaatatttttttaatgtataatttaattaggtttgattttgatttataaaattgttggaaaatatttttttgtaaagtattttttgttattttagtgtgttttaaaatttttattggggagggtggagtgaggttttttattatatttttttatttttaggatatgtttgtattttagaatatgtgtagttagtt

SEQ ID NO: 270 - DNA, 8759 bp, Artificial Sequence
  chemically treated genomic DNA (Homo sapiens)
agttaattgtatatattttaaaatgtaaatatgttttaaaaataaaggaatataataaaaaattttattttattttttttagtggagattttggagtatattgaaatagtaggaaatgttttataaaaaaatgttttttaatagttttgtaagttagagttaagtttaattaaattgtatattaaaagaatatttttttttttatagatttgatgtaaatttgaagtagggggttgtggatttgttataatttatagagaaaataaatattttataagagaaaattgatttaagtaattatttttaatatagttaattaatgttgagaaattgtgagtgtaaattttgtgaagtttttattaagaaagttgtttttttgtttattttaaatatgatggtttggattatttttattgatttttagttttggagtaagtttttagttgttttaggagaaagaagtttatttttttatatagtagattttagtatttagagattattttttttttttaattgagaattttattttatttttttggaggatatttgttgagaagttattgggttggtttttttgattttaatttgtgtaggttgaaagtgaaattttaatagatttgaagaggagaaattgtttaaatttttgttgaggtttttagattttgaggataggaggaaaggaagagtggagggtttgggagttttatttttgaaggtggtttgtgtaataggatttttgtttgggattttgagtattaggaggtagtgagaatttggggtggttgggggagttgaagaatttgggagggtaggaattagtatttagggtatgtagtagaaattaggagagtttaggttaaatttttggtaggttgggagtttatgggagagttttaggtttattttgttgagtttttttaggggtaatttgagtgtttgtgtaggtaggagttgttagatattttagaatatagagtgattttgttttgggttgaaaggtgatatttttggaaggaaaaatttattgtatgtttttgtaaggtttggagtagttatttatttaggggtttattttgtttttgatataagtgggattgggatagggtattttgtttattatgttgttagggtattatatattaggtgtggtgaagttgtttttttggtttgttagtttttgagggggttgagtgtagttgtagggggttatagtttttgttttgttgttgttgttgttgttgttgttgttgttgttgttgttgttgttgttgttattatttttattattattatatggtttatataattggttttttttggttgtgaagagagtgtgttaggatgaggaagtggtggttgagggtgatttagaattgggttttgttgtatttgtgttatgtaggtttgttaggtttttatagtggtattgtgttgttgtagttgtttaggtgttgttgtagtttagtgggttttttagtttgatgtgagtgtggggatggggaggtggtggagggggtggtggtttggttagagttagtggaaagttgtagtagttgtgattttggtatgtagttgttttgtttagtgttttggatttgtagagagatagggtagatggtagtttaagtgttttggagttttttgttgtagtgttgttagagtagtttaggtttttgttttttagttttttggtgtaattttttttgaaaggggaatatttagtagtatttttagtgtttttgtttgtgttgttgtttagtagagaatttttgtatttggttaatggggtataaggagtgggatgtatagtgggtggaatttttaaaagtggggtgtatatgtaatttttttgaagttgtttttttggatttagatgttttaatgtttttatatttaggtttatggatattgatattgttttatataattttttggtgttgttagaaatggttgaagtgttttttaagtaattgtttttggaggaagtgggagtttttgaggttttttttgtttttttgttgttgttgtttttggatattgttttttgttgttgttgttgaaggagttgtatggtgttggttttgtttaggatgtttttaaggttagtggagtagttgtttaagttggggaaagtggggtttagtagggataatgtggatggggtagttgagttatttttgtttggaggtgttggtagttgttgtggtagttttttgttggtggttatggtggttttaggttttgggatgtaattttttttggggtggtattttagggttgattgtggttgtgaaggttgttgttttttatttaggattaggtagtttgtggggtttttatgatgggtttggggagaattatttttattttgttgttgttgttgttgtttggggttagttttttgttgttgttgttgttgttgttgttgttgttgttgttgttgttgttgttgttgttgttgttgttgttgtagtagtagtaaattggtgttgggaggtgttgtgtttgtggtttttgggtgtttggggtttgggttttggattattttgtgtatgttttggaatagattttggaaagttttttggtaggttttggatggtggttgagggtagattttttttagttttaattgtatttttatttttgagtttggttgaattttttatttattttttttattttgttttttttttttttgtttagaagagtttaataggttgtgatgatgtggtagttgttgtagttagttgtttatttgtgggaagttttagagaaggaaatttgtgggagtaattatgtaaaaagtgttttgatagttttaaagttttgtgtagaagaagatatatggtggataagatttgttttgttaggtttatagtttgttttttaatatttgaagggtagatttaaaagatgtttagattttaaaagaaaaaaataaaattttttattttttaaatttagtgtttattgaagtaggtgtaaataagaattgagttattattttttttttttattttggtttttttgtttttgtttgttttgttttttggttattgaagatttgattgtttttttattttttgatttttggttttgtatttggggtggggaaggtaggaggaggtggagagagagtgggggaaaatagagggttttttttgtgtgtagtttaattaggtgggttgtggttgtagtgttgaagttgttttttagttgtttggtttttaagagttttttttgtaatgtgtagttagtttgtttgtttgtagttaaagggagttatttttttgtaaatttgggttggtagtgttgggttgatgggggtgggggggtgggtggggagaagggtggtgaggggggttggttgagagtagttgattgaggtagttgtgggagagaagatgggggagggggggaaggtagggtggggggaggtggggtggagaggaggaggataaaggtagttgttagttttattaggtattttttttgttttttttgagtttttagtagtttttaaaaattttattgaagaggaaagggtagttttgggtggtggttttgaagttgttgtgttgtaagaggtgttggttgttgttggagttgggttggggttggtgtggtgtgtttttttggtttttgtatagtattggagtggttagtttggttttttttttttttgttgttttttttgtttttgggtttgttttggattgttttgtttttttagtaagttggttttttgggattttggagggggtgttgggaggtggagagtaaatgtaatagtttgtgagttgggttttgtttttattgggttggtttttttgtttttttattttttttttttttttttttttttttttttttttttttttttttattgtgtgttaatgtttgtttagtggttttggagaaataagtgttggtgtagtgtgggtgagggtaggagaggttagttttagttttggaggatttttgttttttgaatagtttttgtttttttaaattaaggtttaggtgttagggttttagattttttggaggttagtatttattaaatttggttttaaagtttaatttaaaaaattaatagggtggaggtgagggagggaggaaaaggatgataggaatatttgtttttggttgttaggggttttttttaggattgataagagtgtgtagatgggagagtgggagagttttttataaattgaggagtaagttatgattaagttagtagatatttgttgaaattttagattttgttatagggatagattgggttttgtggtattgtgttatttgttttaggaatttttagttttaagaattagaggttatttttatttttttttttgtttttttttttgtttggaattgtttttaattatgtattttttatttagatttttaaaggtaaaattatttagataagtaggtaaatatataaatattaaaaatatttgttatgtatatataggtgtttaattttgtttagagttttgtaaatgtttgttttgtatgtagttgtttgtttttttaagttgtttttgtatattttaaattttataattggaattatttaaggatagaatttatatagggttgttttttgttttttgatggatagttaggtgtagaggatgatgtgggttattgtaattgtttttttgtggaggaggttttataagttttgtgtaaaggtggagatgtaagtgggaatggaaagagagagaaaatgtaaatgtaaatttataaggaaaatattttttttttatgttagtagagattttgggtttttttatgttttaaatttttttgatttttgattttggggaggttttttgttttaaaagttattttgagatttttgtttgggttttttttgttttttgtagttttttatagagaaaagatgggttgtagttttgttgtagttttattttgtgtatagttaaatattataggtatttatttattttgattaaagaaggtaatttaaatttaaaggtaaggaagattggatatgataggttttattttatagatgaataggttgaaataaggatataatttgttttatgttttatattagtaaaatttaaattagttttttagtttattgttatttgagttagattttagatttattaattgtattgttatttgggaaatggttataaatgaattttttagaatataaaggtttgaagatttttttatttgaggaggtgaaaaattattttttgagattttaatggttatagttttttttgaatatattttattatatgtaagtagaatgtgtagatattttaattttatttgaatatttattgtaatatttaattttattataatttttaattagtattgtttaataggaattgagtgggttggtaggatggtagaatggaattaatataggttttagagttaggagaattatgtgtttatatattaatagtgaaggaaggtgtaaaaattattgaatgaataatggataggagtgaagaggatatatagatataaagaggtttgaaaaaaaattaaggtgagaaataatgttttgaagttattttgaataaaaagtagtttgatatttaaatttgggtttgaaagattttaaagtttatgttgtttttatattattaatattgtttttatagtttttatatttgaaaattgttgttaatataagttatttttagaaggttagtgtgttatttaaaagatataatgtgtatagaataaatttgtaaataggaaagtattttataaatttgaaggattattatgttatttttatttttaaagatggtgttgttaataattatattattattaggaaaggttaattattataagtatattagggttatatattttatttggattttgaattttgattttttagtttaaattttattttttttttattgtttttaagaataagagataattattgattaatattatataagtttattgtttgtattagttttttttttttttttttttttgttttttgtagttttttagtaattaaatggaattagaggtgtttttttagattagttaggttgagagtaagtttttgttataagttttttttgtaattttaagagggatttattaataaagttttttttagttttttgttttggaaagttaggatgagttgatttttggaaaatggtgattattgggttttattttttaagtattttatatatttgtttatttattttatttttgttgttgttaatttagtttatttttagaaggtattgtttttttttatttggagtattgtaaatggttattttttttttatttttttttagaattagttttgtattgtgtagttagagggtttttttttaatagttgtattgaggtataattgatatatataataaattgtatatatttaaagttgtataaattgattatttttgatatatgtgtgtatttatgaaattattatttaattaagatagtgaatatatttatgattttaaaagtttttattgtgttattttgtatattttttttttattttttttatattttttttttttaggtaattaatgatttgttttttgttagtatagattgttttttattttttagagttttatgttaatggaattatatagtatgtatttttttttttttttatttgtattttttattgagtataatgtttttgatgtatatttaagttgttatgtatattattagtttatttttttttattgttaagtagtattttattgtattgttgtattatgttttgtttatttatttatttttgatggatatttgggttttttttagtttggggttattataaataaaattgttataaatatttgtataaatatttttgtatggatgtatttttttattttttttaggtaaatatttagttatggaatgggtgagttatagggtaggtatatatttatttttgtaagaaatttttaaattatttttttaagtgattgtattattttatatttttattttattaatatttggtatggttagtttttttaattttagtattttaattagaggtgttttttttatttaatttttattttttttatgaataaagatgtagagtattttttatgtgtttattttataattgtatattttttttgatgaagattgtaaattttttttttttttttttttttaattgggttatttgtaatttattatgggggttttagagttatgtattttgagtataatttttttattagaaatatgatttaataatattttatttgtagtttgtttttattattatattagtgttttttgaagtataaatattttaaattttgatgaagtttagtttattattttgtttatttatgaattatgttaatttatggattatggtgttagatataataaattatttttaaatttaagattatatagatttttatttgtgtttttttttagaagttgtatagtttttagttttatatttaggtttgtgatttattttgaattaagttttgtagatagatatttaatttttaatatagatgttttattgttttggtattattttttgaaaatattattttttttttattttgttgtttttgaatttttgttaataattaatttttaatatatatttgtatagagggttttttagaaagtttaatttggttatattatttttttgtttaagttttgttattgtttttttattgtttttaatagaaaagtttaaaatattaattatattttatatgatttgtttttttgattttattttatatatttttttttttgttttttgagatttatttatattggtttttatttaggttttttaatgattttataattttttttgtttttgtatattttgttttttttatttgtaatgttggtttatttttttttttatttatttagttaatgtttatgtatattagtatatttaggaagattttttgaattatttaggttagtttaagttttttatttatttattttttaatatattttaatagtatttagtatttgttggaggattttttataatttgttttttttattgaattgtatgttttttaagagtaggaattatgttggtttttgtttattattgaatttttaggatttagtttggtgtgggatatggttattgtttaataaatattttttgaataaatgaatggattttatttttatagaattaaaattttgtttttaaattgggagttttggttttggggggttgttaaatgttttgtgattttagtatatttaggtatgtaataaatttttttttaatttatgagtaaagtagagaattattttaatttatgtattgaatgaatatttgttaagtatttattatttgttaggttttgtgttaggtatttggaatttattgatgaataggatattgtggattttgtatttaaggagtttatttatgatttaggaaggagagtgaagaataatttaaataattatatttgaattggattggagatgaaaagaggggtttatgaataaatttttagagttgttgtttttgttgatttgtggatatttgttattttttttgtatagatgtttataatggattatttttttattttaatattttttttgtttttaatgttgaagttattattttattttatttttttttatagttttagttttaattttttttttggttgtttttttttaggtta

SEQ ID NO: 271 - DNA, 8404 bp, Artificial Sequence
  chemically treated genomic DNA (Homo sapiens)
aggaagttaaaaattttgaaaaaaggttagaggaattgttatttaaaataagtagtttagagaagaatataaatgatttgatggagttgaaaaatatagtataagaattttgtgaagtatatataagtattaatagttaaagtagaagaaaggatattagagattgaagattatttttatgaaataaagtgtgaagataagattagaggaaaaagaatgaaaagaaatgaataaagtttttaagaaataggggattatgtgaaaagattaaatttatgtttgattgtttttgtatttgaaagtgatagggagaattgaattaagttggaaaatattttttaggatattatttaggagaatttttttaatttagtatgataggttaatattttaatttaggaaatatagagaatattataaagatattttttaagaagagtaattttaagatatataattgttagatttattaaggttgaaatgaagttaaaaatgttaaaagtagttagagagaaagttgggttatttataaagggaagtttattagattaatagtggatttttttgtaaaaattttataggttataaaagatgggggttaatatttaatatttttaaagaaaggaatttttaatttagaattttgtatttagttaaattaagttttataagtgaatgataaataaaattttttatagataagtaaatgttgagagattttgttattattaggtttgtattataagagtttttgaaggaagtattaaatatggaaaggaaaaattggttttagttattgtaaaaatatattaaattgtaaagattattgatattatgaagaaattaatgggtattaattaatgggtaaattaattggttagtattataatgataggattagatttatatataataatattaattttaaaagtaaatgggttaagtgttataattaaaagatatagattggtaagttggataaagagttaagatttattagtgtgttgtatttagtagatttattttatatgtaaagatatgtgttttaaataagggaatggaggaagatttattatagtaatggaaagtaaaaaaaaaaaaaagtaggggatgtaattttagtttttgataaaatagattttaaattaatgtagattagaaaaagataagaagggtattatatgatggtatagggattaatgtaatatgaagagttatttattttaagtatgtatgtatttaatataggagttattagatttataaagtgagtttttggagaggaagaaagagatttagatttttatgtaataatagtgggagattttaatattttgttgttaatatttgatagattaatgagatagagtaattaataaggataattaggattttaagttagttttgtattatttagattaaatagatatatttaatatatatatatatatatatatatatatatatattttttgagatggggttttgtttttgttgtataggttgaagtgtagtggtatgattttagtttattgtaatttttgttttttgggtttaagtgatttttttgttttagtttttagagtagttgggattataggtatttgttattatatttagttaattttgtatttttggtagagatgtggttttattatgtttgttagtttggttttaaatttttgattttaggtgatttatttgttttggttttttaaattgttgggattataggtgtgagttattgtatttggtttagattttgttgaaattttaatatttttttggtaatgtaatagaaaattaaagattttgatggtgaatttaattgtttttgagttgtgtggatgaaaatatattttattatttttttttttaatttttaagtttttaggtatatgtgtaggatgtgtaggtttgttatataggtaaatgtgtgttatggtggtgtgttgtatagattaatttattattatggtattaagtttagtatttattagtttttttgatgttttttttttttttatttttttttgttataggttttagtgtgtgttgtttttttttttgggtttattttatggtatgtatgtgtgtatgtgtgtgtgtgtgtgtgtgtgtgtgtgtgtgtgtgtatttatttatgtgtatatattatgatatatatattatattttttttaaattattattttaggtttagggatatatgtgtaagtttgttatataggtaaattgtgtgtttttggggtttggtgtgtatagatttttttattatttaggtaataagtgtagtatttgataggtagttttttgattttttgtttttttattttatatttttaagtaattttttagtgtgtgttgtttttttttttatgtttatgtgtttttattgtttagtttttatttataagtgagaatatgtagtgtttggttttttgtttttgtgttagtttgttgaggataaaggtttttggttttatttatgtttttgtaaaggatatgattttatttttttttatggttgtaggaaaatatattttatatattagtgaatatagttaaattaatttatggttaagatatatatttttttgtaaattgagaaatttttttattataattgtaatatggtaataaataaatttagattatataaatgtaatttagatgttgataaattggttttaaataaagtaagtgatatttatgtatgaagagagtttattttagtttttagaatttttttttatttttttgttatttttatttttagtaagtaagtatttattgtgtgtgtaatattgtgttaggtattaaggtaatgatgatatttaagatttggtttttattttgaagataagtataggagaaatattattagttatgatgttttttgttgtaaataagtgaaaattttagtttagtttaggttagttttagggttggttaaattagaggtttatttataatattgaggatttagatttttttgaaattttttttgtattaatattagtatttttattttttttgtagggtggtttgttttatgttataatggttgtagtaattagaagtgttatatttttagtaatatttaatattattattattatttaataatatttagaattgtgttatttttgttttaatttattaggtttttagtagattattttttattttttaaatgttaaaattgtattttgagtttttgtttaaattaatttggggtgaggtgaatggaagtagtattttaattgtatttattttttgtagttggatttgggtttgggttattttttgatatttgtttataagaaagatttttgaagttaggtaggaatggttgttgagtaggttagtgtttgttaaatttttatatatttttatatatgttataatatgtagataaaaagataattttttatataatttgttgggataaatttaggaggtttatagtatgatttgtttgaaggttttttttgttttagattttgtttagttgttttaggatgaggggatttatattatagtataattgtattttatttatagtataaattattttttttttttttagttgatgagtttagatgggtaataatagtgtttgttaaagagaaaaaaaaatgtatttaaattagataatttattggtataaatattgagatatagaagtgataatagttttaagttaatgtttgatggtggtagttttagtaagtttttttttgatgtttttgtgtttttgtatatgttttttttttgttattgttttttttattaaatataatataatggataagtggaattaaatagaattgagtttaaattttttgttatttattggttttggtattggataaattaatttttttgagtttgtttttttatttgtaatgtagattagttaatattatttattggaaagtgttgttttttagttaatgtatgtaaggtttaaaatttagatgatgggttgataggtgtagtaaatttttatggtatatgtatgtttatgtaataaatttatatgttttgtatttgtattttggaatttaaagtaaaaaaaaaaaaaaaaaaaaaaagaaagaaagaaaaagaaaaaaaaggttgtttttggggattaaataagataattatgtaaggtggttagtatagtttttggtatatagtaaatgttaggtttgtttgatagatttttatttagtagttattgtttttttgaaaattttttttagatgtttttatggtgttttttgtttttatattattataattttttattatattattatttgtttattttttatagttttttttttttttttttttaattagtgattttaaaaggttagtaagtgtttaatattttttattttttaagtgattggtaaagttttgtatttattagtgttttaagtttgtttttgttttggttgattttgtaaaatggattgggtgggatgagaggtggggggtgttgttaaggagggagagtggtgtttttgttgagggtgtattagttagatattttttgtggggtttgagagttttttttattagattttgggatagggatgaggtttatagttatttattagattttttgtatagttttgttaagtgtattttggtttggagggggtggttttgggtagaagtatgtttgggttgtgttggatgttttttggaaggtgtttggatttatgttaggttttttagtttaattttttatgatttagtgttttagtttgtgtattgattagtgttttagttttttatagatgttggtgggtttgggagttttgtggatgtgatgttgtgggtggaagtgatgtttttttgtggttggatgtggtgtttagttgttgggtgggggagggtgtgtttggttttttttaggggatgttgaaattatttttgtaatgggagttgggagaggatggggtgtgttttgatgtgtgtgtgtgttgttttttttggtgtttttttatagtttgttggtttttgttgtggaaaggtgttatgttgtttaaaattttttgaaaaatggttgttattgttgttgttgttgttgtggaatttttggtattgttgttgttgtttttttttgaggaggatttagagtaggatagtggtttggaggatttgttttttgttaggtgagtgagtagagttgttgttgttttatgtgggaagggtgttttgggtgtgtgtagggtgggtgtaaggtggtttggtggggatttgtttttgttaggggttgggttttggtgggaggaggtgttttttttgttttttgttatggtggagtgtttgtagaatggtgataggattttgggtttttgggtgaggggttttggttttaatttgataggtgttgggtgggtggggttagggttttgagtgaagtgataggtgtagtttttttttgtgaggtttggaggtagagggttgttgtgagtgtttattagatgtaaaaaatgaaaaataaaaatataaaaatggtgtttgtgggagagttttttattggagaattggagtattttggtggttgtttgattttttgttttggtttatgtgatgtaatagttgggaagtatttttttttgggtgtgtattgtatttgaagtttatttgtgggagaggttgattagaaagttttggataagaagtgtagggttttgagtgtttattgtttataggatatttggtttaggagttttgtggtgtttttttagaataataatgtattgaggttttggggatttaaagttatttgtagtgattgatggagtgtaattttttagaggaattgaaatatgggtaaaatttttatgagatatttattagaagtgtttgaaagtttttaaattttttttttttttgtttgatgaattttttttgtgtgttagttggttttggtttgttttattattttttttattttgttttttgattttgaattagtaaggattttggtgttttttttttttgtttttgtttttggtataaaattagtggttttgtgtgtaaatggaaatttttgtttttttttattaagtggaatttaaatttaagtaagtttatatgaatgtattagattttgaagggaagtatttattgtattataatattttattttttttgatttttttattttatggttaaatagttatgattgaaagagtgtaattgttattattgttagtattggttttattttgagataagtttattgtagagggaatgggatttgtttttgttttttattatttttttttttatttttgtttattattaaatttttttatttttatttatttttttttatttggtatatattaataatttatggtagaaaagattgaagtgggatttaggaaatggtttttggaaggttattaaaaatttatatatttaaatggattgttttataggttagttaaaaattatatttgttaaaaaattaaaataataataataaaaaattaaaaattatgtttggggtatgttttgggaaaagatatggttttagtttttgattaaattttgatgtatttaatttttgtaaattttttttgggaaaatgtagtaatggttattttaaagaattttatgttatgtatatagttttggaagtatattttaatgtagggtaattaggaatattgatgttgtggttattgtttggaaaaaagaggattgttttttttattttttaatttattttatatattttaagtaatggaattataaaaaatttttttataagttaaaattatataagatatagtttgtttttgattatttatatttataaagggttttattaatatagatagttgaattttataaattaattagtaagggtagaattattgttgtgtagtttgatattgagtattttgtttggagatggaattaaggtttagtttaattgtatttttagtgatagattttatttttgatttgagagtttagattttatttttgttgttttatttttggtttaagtaatgtagttggaagggaaattgttattaggaatagtatattatatttattgttgaaataattaaaggttaattatgttttgagttgggtgtgatggtgtgtatttgtagtttatgttatttaggaggttgaggtaggaggattatatgagtttgggagttggaggttagtttgggtaataatgtaagattttagtttttaaaaaaataaaaaagttgattaggtatgttggtttatgttgtaatgttagtattttgggaggttaagatgggaagattgtttgaggttaggagtttgagaggagtttgggtaataaaataagattttgtttttaaaataaattttaaaaaattagttagtggttgtggtatatttgtaggtttatttatttaggaggttgaggtgggaggatttttgagtttaggagtttgagattgtagtgagttatgattttattattgtattttagtttggatgatagagtgaaattttattttaaaataagaaaaaaaaataaaaattaattatgttttgaaggaggaattggtagtttagaatagtggttaagggtatggattatagagttagattgttgggtttatatagtggtttattttttattggttgagattttaggtaagttttttaatttttttaatttgatagatatttgtaaatgtttatttttatagatgagaatatttatttaaaagggttgatgttgggatttagtgaaattatatgtttaaggtattttttataggattatagtaaatatttaaaaattattaattattttttatattatttttattagtagataatatatagaaattagatgaatgaaaatgaattagttaataagaatttattaaatgtttgtttttgttaaggggaaaggataaaaataagtagttgtattatgtaagatgtgttagtaggtagagagatatatgaaatattgataagagaagattatagtttaataaagttattggtgttgaattgtataatattatttatgggtttttatttttttgttgttatttttattttatttttttaaatagttttagttattatatttatttttttttatagaagtgttttgttgttttgaagtatatttgatttattatgtaagtaaatattttttattgtgtggtatttttattttggaatgattatgaaaaagataattatatgtttaaatttgaagtgtaatgtttttttaagataaaataagattttaaagtatttaataatgtttttttttatagtagtgttatgtgtaaattattgaaataagtatgtattgaattaatttgatttataagtatatgttaattatatgattatttttatttggtagg

SEQ ID NO: 272 - DNA, 8404 bp, Artificial Sequence
  chemically treated genomic DNA (Homo sapiens)
tttattaaatgaaaataattatataattggtatatatttataaattaaattgatttagtatatatttgttttaatagtttgtatataatattattgtgaaaaagaatattattaaatattttaagattttattttattttagaaaaatattatattttaaatttaaatatatgattattttttttatggttattttaaaataaggatattatatagtgaaaaatatttgtttgtatggtaagttaaatatattttaaagtagtaaaatatttttgtgaaggaaagtaaatgtaatagttaaagttgtttgggaaaataggataaagataataataaaaagataaaaatttatagataatattatataatttaatgttagtgattttgttaaattgtagtttttttttattaatgttttatatatttttttatttattagtatattttatatgatgtgattgtttatttttgttttttttttttaataaagataagtatttaataaatttttgttggttaatttatttttatttatttaatttttatgtgttatttattaataagaatagtatgaagaataattaataatttttgagtatttattatgattttgtagaaagtattttaaatatatggttttattgaattttgatattagtttttttagataagtatttttatttgtaaaagtagatatttatagatgtttgttaaattggagaagttaaagaatttatttgaggttttagttggtaagaggtaaattattatgtgagtttaatagtttaattttataatttatgtttttgattattattttagattgttaattttttttttaaaatataattagtttttgttttttttttttgttttgaaatagggttttattttgttatttaggttggggtgtagtggtgaaattatggtttattgtagttttaaatttttgggtttaaggatttttttattttagttttttgagtagatgagtttataggtgtgttatagttattggttaattttttaaaatttgttttagagatagggttttgttttgttgtttaggttttttttaaatttttggttttaagtaatttttttattttggttttttaaagtgttggtattatagtgtgagttaatatgtttggttagtttttttgtttttttaaagattggggttttgtgttgttgtttaggttggtttttaatttttaagtttatgtgatttttttgttttagttttttgagtagtatggattataggtatgtgttattatatttagtttgaaatatgattaatttttgattattttaataatgaatgtggtatgttgtttttagtgatagttttttttttagttatattatttaggttagagataaggtaatagaaataagatttaaatttttaaattaggaatggaatttgttattggaggtgtagttggattgagttttgattttatttttaggtaagatgtttagtattagattgtatggtagtggttttatttttgttggttaatttatagagtttaattgtttatgttaatgaaattttttgtgggtatggataattaagaatagattgtattttgtatggttttgatttataagagaattttttatagttttattatttaaaatatataaaatgagttaaaaaatgaaagaaatagtttttttttttttaagtagtggttataatgttaatatttttggttattttatattagagtatgtttttaaagttgtgtgtataatatggaattttttagagtagttattattgtatttttttaagggaaatttgtaagaattggatatattagaatttaattagaaattaaagttatgtttttttttagaatatgttttagatgtggtttttaattttttgttgttgttattttggttttttaatgaatatggtttttaattgatttataagatagtttatttaaatatataaatttttaatagttttttaggggttattttttaaattttattttaattttttttgttgtgaattgttagtgtatattgagtggaaagaaatgggtgagggtgaaaggatttggtgatagataagaatgggagagaaaatagtgaaaaatagaaataagttttattttttttgtaatgaatttgttttaaagtagaattagtgttgataataatgataattatatttttttaattatagttatttaattataaagtagaaaaattaagaaaagtaagatgttgtaatataataaatatttttttttaagatttagtgtatttgtatggatttgtttaaatttagattttatttaataagggaaaatgaaaatttttatttgtgtatagaattattaattttgtgttaaaaataaaggtaaaaagaggggatattaagatttttgttggtttaaagttaaaaggtaaaatggaagaaataatgagataagttgaagttgattaatatgtaagaagagtttattaaataggaaaaaaaaaagtttagaaatttttaagtatttttggtaaatgttttatgaaagttttgtttatgttttagtttttttaaagagttatgttttattaattattatagatggttttgagtttttaaggttttgatgtattattgttttaaggaaatgttgtaaagtttttgagttgagtattttgtgggtaatggatatttaggattttgtgttttttgtttaaggttttttggttggttttttttataaatggattttagatgtagtgtatgtttggaagaaaatattttttaattgttgtattgtgtgaattaaaatagaaagttagatgattattggagtattttaattttttggtgaaaaatttttttatagatattatttttgtatttttattttttattttttgtgtttgatggatgtttgtaatgattttttgtttttgagttttataagagggaattgtatttgttattttgtttaggattttagttttatttgtttgatatttgttaagttgaagttgagattttttgtttaagaatttagaattttgttattattttgtagatgttttgttgtggtggggggtagggagggtgtttttttttgttgggatttggtttttggtgaggatgggtttttgttgagttgttttgtgtttgttttatgtatatttggggtgttttttttgtgtgaggtgatggtggttttgtttgtttatttgatgagaggtaggttttttgggttgttgttttgttttgggttttttttaggagggggtggtggtggtggtgttgggggttttgtggtggtagtggtggtggtggtggttgttttttggggggttttgggtggtatgatgtttttttgtggtgggagttagtgagttgtggaggagtgttggggaggatgatgtgtgtgtatgttggggtatgttttgtttttttttgatttttgttataaaaataattttaatgttttttgagaaaaattggatgtgtttttttttgtttggtaattgagtgttgtgtttaattgtgggaaaatgttatttttgtttgtggtgttatgtttgtgaggtttttgggtttgttggtgtttgtggggaattggggtgttggttggtgtgtgggttgggatgttaagttatgaggaattaaattgggaaatttggtgtgggtttaggtgttttttaggaggtatttggtgtggtttggatgtgtttttatttagaattattttttttaggttggggtgtatttaatggggttatataaagagtttggtgggtgattgtgggttttatttttattttggggtttgatagggaagatttttgggttttgtagggaatatttggttagtgtatttttggtgggagtgttattttttttttttggtggtgttttttattttttattttgtttaatttgttttgtaaagttggttaaaataaaaataaatttggagtgttgataggtgtggaattttattagttatttagaagatagaaaatgttagatatttgttggttttttgggattattggttagggaaaggaagggagggagttgtggggaatgaatggatagtagtgtaataaaggattgtagtggtgtaagaatgggaagtattgtggaaatgtttgaggaagatttttaggggagtagtagttgttgaatagaagtttgttaggtaggtttgatatttattatgtattaggaattgtgttggttattttatataattgttttatttaatttttagaaatagttttttttttttttttttttttttttttttttttttttttttttttttattttaagttttgggatataagtgtagaatgtgtaggtttgttatataggtatatgtatgttatggaggtttgttgtatttattaatttgttatttaggttttaagttttgtatgtattagttaagaaataatgttttttaatgggtagtattagttagtttatgttgtagatgaggaaataggtttagaggagttaatttgtttaatattagggttgatgggtagtagagaatttgaatttaattttatttgattttatttgtttattatattatgtttgatgaagaaaatagtgatagagaaggagtatgtgtaaaggtataaagatattagaaaagagtttgttgggattattattattaaatattggtttaaagttgttattatttttgtgttttggtatttgtattaatagattatttagtttgaatatatttttttttttttttggtagatattgttattgtttatttgaatttgttaattgagaaggaaagagatggtttatgttgtgaataaaatatagttgtgttgtgatgtaaatttttttattttggagtagttgagtaaggtttaaggtaggaagaatttttaagtaggttatgttgtaagttttttgagtttattttagtaagttgtataagggattatttttttatttgtatattatgatatatgtgaggatgtgtaaaggtttggtaagtattggtttatttaatagttatttttatttaattttagaaattttttttgtgggtaaatgttaggagatagtttaggtttaggtttagttataaagaatgaatataattaaagtgttatttttatttattttattttagattagtttaggtaagagtttaggatgtagttttgatatttgaaagataaggagtagtttgttgggagtttgataaattgaaatagggatggtatagttttaaatattattaaataatagtaataatattaagtattattgaggatgtgatatttttgattgttgtagttattgtaatgtgaggtaagttattttatagagaaggtagaaatgttgatattggtgtaggaggaattttaaaagaatttggatttttagtgttataaatgagtttttgatttggttagttttggagttgatttaagttgagttgaggtttttatttgtttgtaatagaaagtattatgattgataatgttttttttgtgtttatttttaggatagagattaaattttgggtattattattgttttagtatttagtatagtgttatatatatagtaaatgtttgtttattaaaagtagggatggtaggaaagtgaaggaaagttttaggaattgaagtaaattttttttatatgtagatattatttgttttatttaaaattagtttattaatatttagattatatttatgtaatttagatttatttattattatattataattatgataaagagattttttaatttataaaagaatatatgttttgattatggattaatttaattatgtttattagtatgtaaaatatatttttttgtagttataaaaaggaatgagattatgttttttgtaggaatatggatggagttagaagtttttatttttagtaaattaatgtaggaatagaaaattaaatattgtatgtttttatttataagtgggagttaaataatgagaatatatggatatgaagaggggaataatatatattgggggattatttgagggtgtagggtgagaggatagaagattaaaaaattatttattaggtattatatttgttatttgggtggtgaaaaaatttgtatatattaaattttagagatatatagtttatttatataataaatttgtatatgtatttttaaatttaaaataatagtttgaaaaaagtgtggtgtatatattataatatatatatataaatagatatatatatatatatatatatatatatatatatatatatatatatatatatattataaaatagatttaggaaggggaataatatatattggggtttgtagtggggaagggtggggagagggagagtattaggagagttaatggatgttgggtttaatattatggtgatgggttgatttgtgtagtatattattatagtatatatttatttgtgtaataaatttgtatattttatatatatatttgggagtttaaaagttgaaggaaaaaataataaaatatatttttatttatataatttagaagtaattgagtttattattaaaatttttagttttttgttgtattattaaagaagtattagaattttggtagagtttagattaggtatggtggtttatgtttgtaattttagtagtttgggaggttaaggtgggtggattatttgaggttaggagtttgagattaggttggtaaatatggtgaaattatatttttattaaaaatatgaaattagttgagtgtggtggtaggtgtttgtaattttagttattttggaggttgaggtaggagaattatttgaatttaggaggtagaggttgtagtgagttgagattatgttattgtattttagtttatgtgataagagtaagattttattttaaaaaatatatatatatatatatatatatatatatatattgaatatgtttatttagtttgaatggtgtaaaattgatttgaagttttgattatttttgttaattattttgttttattgatttgttaaatattgatagtggggtgttaaagttttttattattattgtgtgggagtttaagtttttttttttttttttaaggatttgttttatgaatttggtagtttttgtattgggtgtatatatatttaggataggtagttttttatgttgtattgatttttatattattatgtaatgttttttttgtttttttttgatttatgttggtttaaagtttgttttattagagattaggattgtattttttgtttttttttttttttgttttttattgttgtggtaaatttttttttatttttttatttagagtatgtgtttttgtatgtgagatgagtttgttgaatatagtatattgatgggttttgattttttatttaatttgttagtttgtgttttttaattgtggtatttagtttgtttatttttaaggttaatattgttatatgtgaatttgattttgttattatgatgttagttagttagtttgtttattagttgatgtttattagtttttttatagtgttaatggtttttataatttggtatgtttttgtagtggttgggattaattttttttttttatatttagtgttttttttaggagtttttgtaatgtaggtttggtggtgataaaattttttaatatttgtttatttgtgaaggattttatttattatttatttataaagtttagtttggttggatataaaattttgggttgaaaatttttttttttaagaatgttgaatattggtttttattttttatggtttgtagggtttttgtagagagatttattattagtttgatgggtttttttttgtaggtaatttgattttttttttggttgtttttaatatttttggttttattttaattttggtgaatttgatgattatgtgttttggggttgttttttttgaggagtatttttgtggtgttttttgtattttttgaattggaatgttggtttgttgtgttaggttggggaaatttttttggataatattttgaagagtgttttttaatttggtttaattttttttgttatttttaggtatagggataattaaatataggtttggtttttttatatagttttttattttttggaggttttgtttgtttttttttatttttttttttttaattttgtttttatattttattttataaaggtgatttttaatttttgatatttttttttttgttttggttgttgatatttgtgtatgttttatgaagtttttgtgttgtgttttttagttttattaggttatttatgtttttttttaaattgtttattttaggtagtaatttttttaatttttttttaaggtttttagtttttt

SEQ ID NO: 273 - DNA, 5312 bp, Artificial Sequence
  chemically treated genomic DNA (Homo sapiens)
gttggttttgggggttgatgattttttgggtaggtgatgtgttttgtttaggttttattttttgtgtttgtaaaatggggtggataatgtagtttaaggtagagttgtgttaaggttttttgttgttgttgggttttggtggtttgattgggtttggggtttgagtgtgtttttgggtttgggggggttgttgtgatggatttgttggtagtgttttaggattgtttggtggagtagttgttgttgttgtggatttaggtttagaggtggtttaaggtgtgtgtgtggagagggtggaatgtgggtttgtgattttgtgggttttgggatttggtatggggtttttgtttttgtgtgttatggtttgttagtgtttaggtttagtttttttttttgtagtggttttgtaggtttgtggttttatggtggggtgatgtgttttgtttaggttttattttatgtgattttaaaatgtggtggagaatgtggttgtgggatttttttaggggttttaagggtttgtgggggttgggtgtttgggtgtgtgggtgggggaggtttggtgttgtggtttataaataggtgttgttttgttattgttgttgttgttgtttttgtggttggatttgggttaggtggggttttttgttttttggtattttttggaggggtgagtgttgaggtttttagtttttttggtttatggagggttttgagtgtgttttaggggttttaattttgttgttttttgtttgaggagggaggatattgtttgtgtttgttgtggtttgatatttttttatggaataaatatagtgttggtttttgtagagttttttttgggattggggttaggggtgtttttttttgttattattttgtttgtttttttatttttaggtttttgtttatgggttttttttttatttttgttaatgaaatgttttattttgggaattgtattttttgttgtttttttatattgtatttggtaagagatagggtattgggtttttggagaaatttttgtgtttttattttgttttattttgtttttaggatattgataagtagtatgtgggttttgttatattgtttaattaggtgtattgtaagttggtgaagaaaggttttgattttatatttatggtggttggtgagtgggttaggttttttgggggagtggttggggttattggttagttaagttttgttgttggagttttagatttaatgtagttttttttttgtatttgtgtgtaggtgagttaggtttggggaagtttatattggtttatagtttttttttgatagatttgtataaggattggaagttgtttagtgttgagggtgagtggtttttaggaggttttggtattgatttttagtttttttttatgggatttttttaaggatttttttttaggtttagtttttattgttttgtttttgtggtgtgggttttttgggggtagggttaaggtattaagatggatgaggatgagggttttggttgttaagggtgaggggttgagggttggagaggtttttttagtggttttttttttgtagagtgtattagttagatggtagagattttaaaatatatggtggatattgaggagaagggagttaagttgaagtttattattgtggatatgttgggatttggggatgttgttaataatattgagtggtgagtgaggtttgttgagaaaggttttgtttaggtggttatagtatttgaggtttggttttattttttttttgtttatagttggaagtttattattgattatgtggattagtagtttgagtagtatttttgtgatgagagtggttttaattgaaagaatatttaagataattgagtgtattgttgtttatattttatttttttttttgggtatgggtgtgtggttgttttggggttaggtttgggagtgtagtttttataatatggttttttggttgtgtttatgtttatttttggttgtttttggtaggttgtggttagtggatgtgggttttatgaaggtattgtatgagaaggttaatattgtgttttttattgttaaagttgattgttttgtttttagtgagatttggaagttgaaggagtgggtgagtttgttgttgtataggggtttggttagggttttggggttgagagtattagggggatttgtttggttttaaatttgatggtttttgttttattatagatttgggaggagattgataagtttgggatttatgtatattagttttttgagtgtgatttggatgaggatgaggattttaagtagtaggattgggaattgaaggtgaatatgtagattggtggggtaggggggatggagttggtgaggggtagaattagagggttttgttttttttatattgagtttgttggaggagggttaggttagtttagttgggtgtaagagttatttgttttaggagtagaggatttgtattttttttatttagggttagaaggtaaaggttattatgtttttgtttggttggggtgggttatgtgggttttgtgtggtgtttggtaggtatggagtatttgtttagatttagaggtgtagtagtgggttaggtttttaattttaattttttttttatgggttattagaggaaggggttgttttagtggtatattttggtttttagatttttgagttttagggttggtggttttgggtgttttggtagttagagtgatgatggagattatgttaggggtaggtggttattagggtaggggtattagtatggggagatataggtttagttttggggagggaaggggtagttggagggggtggtttttgatgagggaggagatgaggagggagtatgtttggttgggtatagtttggaaaggttttggaatgtgagttatatgggttttggttttagttaggggtagagaggttagaaaggggtaatgttaggatttttttgaggagagatagttgatggtgatgttggaggggtgttttgggagttatatgtttgttttttattagtaattgtgtaattatgtttattgggtgtgagttttttttttttttttttttaggagagtgtgttttttgttgttataggtagtaatatggtggtggaggttaaggggtagtgggtttggggttgattgtatttttgggggattgtggagggtgagtagagttttggggtattaggtttggtgggggaaggttgttttgggttggtgttagtttattatttatttttattttgtagtggagaattaggtgtattgtgattttgtgaagttgtgtaatatgtttatttgtatgtatatgtatgattttaaggatgtgatgtgtgatgtgtattatgagaattattgtgtgtattgtatttagtagatgattaggtgtgtgttttagttgtgagttagattttgtttttttggttttgtttatgtttttataattgagggttggttttgttagtttatttagatttgaattttgtattattttttaagtttttttttttttttagagtttggtttttttagaattaagtttagggttgtgagggttttggagggtagggttttagtagtggtggggatgggttaggtattgttagtttatgttgagttttttggtggtgttgttttgtttatttttttttttgttttgtgtagtaaattgatttaggatagttgtatggagagttttattttgattttgttgttgtttattttggatgttgagattgagaagtttattaggatgaaggatgaggaagtatgtggggtggtgggggtggtggaggtgggtgttagggatgtttttttgtggtgttgtttatttgttgggttgtttttgtttgtagttgaggtgtatgtaggagatgttgtagaggatgaagtagtagatgtaggattagtgatgtttgttgtggatatattgtttgtttttgggatgtttttgtatttttggatattagattggattgtttttgatttggagatgtggggttatagtttttagttgattttaatttatttttagtattatttttttttaggttattgtgtttgtttttgaggggtttggattgtagtttttgtttagttggttttttttgattttgggggattaggagtgaagttgggtgggattttagagatttgttttttttgttttttttttgtttttggatggttatagtatttaaattgtaggttttgttttggtaggtaggtaaagttaggtagaagaggatttttaggattttgggtttgttttttgttttagtgttgtagaatggatttgggagtttttttttgtttgtttttgtgggttatttagtgagtgttgagattttattttttgttgaggtgggttgagtttttttttatttttagatgtttagtgggtagggttgggttgaattaaatgggagttttttagatataaggaggttagaggttgtaaggagtggggttgtgattgtttatattttttttttatagtttggtttgatttggagggtttttggggtattgggtggtgagttattttttggtaatttttggtgttgttttttgtttttgtttgaggttttttttttttagtattgttgtggtgtgttgggattttgagtttaggttttttgatgtttttatttgtatgatttttttttgttatatgatgttttgtttttttttgttgtgaatgttgtgttttgttttggtgataggagaataatgttggtgaatgttgtagtgggtgtttgagtgttttgtgtgtttttgagagtgggtgggagtggaagtttgagtggtttgtggtttttggtgatagtgtgttatttgttgttgtagtgtgtgtttgtgtggtttttgggttatttttggttaggttgtagtattgtggttggtgtgggtgtggtaggggtggggtggttttattgtttggtttttttgtttatgttttttgttgtagagtaagttgggttgttgtttttttgttatgggttttggtgagtttggagtttggttgggtttttggttgttttttaggttgatttgggttgagaggagttttggttgtttggttgtagttgggagagatttgggttagatttagaggggatttttagttggtgtgtggggtggttagggtggagaggttggtgggttattgggatgttgggtattaggggttggatggagttgggttggtagtttgggtatttagagatgttgtttaggtgtttgttgattgtttggtttattgtggtgttttttttgtagg

SEQ ID NO: 274 - DNA, 5312 bp, Artificial Sequence
  chemically treated genomic DNA (Homo sapiens)
tttgtaagggaagtgttgtagtaagttgagtggttggtgggtatttgggtgatatttttgagtatttagattgttggtttggttttatttagtttttgatgtttggtgttttggtagtttgttagtttttttattttgattattttgtatgttggttggaagttttttttaagtttgatttaagttttttttagttgtagttaaatgattagagttttttttaatttgggttggtttagggagtagttgggggtttgattggattttagatttattggagtttatggtgagaagatggtagtttggtttattttgtagtgggaggtgtaggtgggagagttgagtgataaggttgttttgtttttgttatgtttgtattgattatagtgttgtggtttggttagaaatagtttagaggttgtgtggatgtgtgttgtagtggtagatagtatattattgttggaggttgtaggttgtttaggtttttgtttttatttgtttttaggggtatatggagtatttggatatttgttgtgatgtttattaatattgtttttttgttattaggataggatgtggtatttataatggaagaaaatggagtattgtgtggtgggaagggattatgtgggtgggaatattgggaggtttaggtttaggattttggtatattatagtggtgttggggagaagaggttttgagtgagggtaggggatggtattgagagttgttaggaggtggtttattgtttagtgttttgggggttttttaggttgggttgggttgtggagaaggggtgtaagtggttatgattttgttttttgtagtttttggtttttttatgtttggagggtttttatttgatttagtttaattttgtttgttaggtgtttggggataagggaagatttggtttgttttgatagaaaatggggttttagtatttgttgggtgatttgtgggagtaggtaaaggagggtttttaagtttgttttgtagtattggggtagggaatagatttaggattttgggaatttttttttgtttagttttgtttgtttgttagagtagggtttgtggtttgggtgttgtgattgtttgggggtgggggaagggtaagggaggtggatttttgaagttttgtttaattttgtttttgattttttaaggttagagagggttagttgggtgggggttatggtttaggttttttggaaatagatataatgatttgggagggggtggtgttgagaataaattagggttagttgggggttgtggttttgtgtttttgggttgggaatagtttggtttggtgtttaggggtgtgagggtgttttggagatggatggtgtgtttgtggtgagtgttattggttttgtatttgttgttttattttttgtagtattttttgtatgtgttttagttgtgggtggagataatttggtgggtgagtagtattgtggaggagtatttttgatgtttgtttttgttgtttttgttgttttatatatttttttattttttattttgataagttttttagttttggtgtttggggtgggtagtggtaggattgggatggggttttttatgtggttgttttgggttagtttgttgtgtggggtgggggggaggatgggtggggtggtgttattgggaggtttagtgtgggttggtgatgtttggtttatttttgttattgttgaggttttgttttttggagtttttatagttttggatttggttttagggagattaggttttgggggagggggggggtttagggaatggtgtaaagtttaagtttgggtgggttgataggattggtttttagttatggagatgtgggtggggttagaggggtgaggtttggtttgtggttggggtgtgtatttggttatttgttggatgtagtgtgtgtggtagtttttgtagtgtatgttgtatgttatgtttttgaggttgtgtatatgtgtgtggatgagtatgttgtgtagttttatgaagttgtaatgtgtttggttttttattgtggggtgggggtgggtagtgggttggtgttggtttaggatagtttttttttattagatttggtattttaagattttatttattttttatgattttttaggggtatagttggttttggatttgttgttttttggtttttattattgtgttgttgtttataatggtgaagggtgtgtttttttgggggaaggagggagaaaggtttatatttggtgagtgtaattgtatggttattgatgggaaatgggtatgtaatttttggggtatttttttagtattattattaattatttttttttaaagagattttggtgttgtttttttttggtttttttgtttttggttggagttagagtttatgtggtttatattttagggtttttttaggttatgtttaattaggtatgttttttttttatttttttttttattaagaattattttttttagttgttttttttttttttagggttgagtttatgtttttttatgttgatgtttttgttttggtggttatttgtttttggtatggtttttattattattttagttgttggggtatttaaagttattaattttggagtttagaaatttgggagttagggtgtgttattggggtagtttttttttttggtgatttatgggaagagggttggggttgggggtttggtttattgttgtatttttggatttgggtaagtgttttatatttgttaagtattatatggggtttatatgatttattttagttaggtaaagatatggtgatttttattttttagttttggatgaagggggtataggttttttatttttagaataaatgatttttgtatttaattgggttgatttggtttttttttagtaggtttaatgtgaaggagataaagttttttggttttgttttttattagttttattttttttgttttattagtttgtatgtttatttttagtttttggttttgttgtttgaagtttttatttttgtttgagttatatttagggaattggtatatatggattttaaatttgttaatttttttttggatttgtggtggggtaaggattattagatttgaggttagataagtttttttggtatttttagttttagggttttggttaggtttttgtgtgatggtaggtttatttgtttttttagtttttggattttattggggataagatagttagttttggtgatgagaggtatgatgttgatttttttatgtaatgtttttatgaaatttatatttattggttgtagtttgttgagagtagttaagggtgggtataggtatagttagggggttatattgtaggggttgtatttttgagtttggttttaggatagttatatatttatgtttgaagggggagatgaagtataggtagtagtgtatttggttgttttggatgtttttttggttgaggttgtttttattatggaagtattgtttaaattgttggtttatatagttggtgatgggtttttagttgtgggtaggagggaggtgaggttaggttttgagtgttgtggttgtttaggtaaggttttttttagtaggttttatttattatttggtgttgttgatagtgtttttgaattttggtgtgtttatgatggtgagttttagtttgatttttttttttttaatgtttattgtgtgttttagaatttttattgtttggttgatgtgttttatggggaaggggttattggaagggtttttttaatttttagttttttatttttggtagttaggatttttgtttttatttattttggtgttttggttttatttttaggggatttatattgtgagaatagaatagtgggagttggatttgaaagggagtttttggagaggttttatggaaggggattggggattagtgttagggttttttgggggttatttatttttagtattgagtagtttttggtttttgtataagtttgttaggaagaggttgtggattagtgtggatttttttaggtttgatttatttgtatataggtatagagaaggagttgtgttaggtttggggttttaatgatagagtttggttggttagtgattttagttatttttttgaggagtttggtttatttattagttattatgagtgtgaagttaaagtttttttttattgatttgtggtgtatttggttgggtagtgtggtgaagtttatgtattgtttgttaatgttttggggataggatggaatagggtagggatataaaggtttttttagaagtttaatattttgttttttattaaatgtggtatgaggagatagtagagggtatggtttttagggtggggtattttgttggtaaaaataaggggagggtttgtgggtaaaagtttggagataagaaggtaggtgaggtggtggtaggagaaggtatttttggttttaattttagggagggttttgtagggattgatattgtatttattttgtggggagatgttaggttgtagtaggtataggtgatgttttttttttttgggtagagggtagtaggattgggatttttgggatatatttaaggttttttataagttggagaagttgggggttttgatatttatttttttggagagtgttagggggtgggaggttttatttggtttggatttagttgtgggggtggtggtagtggtggtggtggagtagtgtttatttatagattgtggtgttgagttttttttgtttgtgtgtttaggtgtttagtttttgtagatttttggggtttttggaggggttttatggttgtattttttgttgtgttttggagttgtgtgaggtgaggtttggatagggtatgttgttttattgtggggttgtggatttgtgaggttgttgtggagggaagggttgagtttaggtgttggtgggttgtggtgtgtggggatggggattttatgttgagttttggagtttgtggggttatagatttatgttttgttttttttatatatgtattttgagttgtttttgggtttgggtttgtggtgatagtagttgttttattaggtggttttggggtgttgttagtgagtttattgtggtgatttttttaggtttgggggtatgtttggattttaggtttggttaggttgttagagtttggtgatagtgagggattttggtgtggttttgttttaggttgtgttgtttattttgttttgtggatgtgggaagtgaggtttggatagggtatgttgtttatttgggggattgttgatttttgaggttgat

SEQ ID NO: 275 - DNA, 3025 bp, Artificial Sequence
  chemically treated genomic DNA (Homo sapiens)
tttttatgatttgatttttatagttgttttatttatgggttttttataaattaggggtatagaggagtattgaaagttagtttagaggtgagtgtgtgtagttagtgttttttgtggatatagtagttgggtgttggagaggtttggaaagggtgtgttggagagttaagtgttagttgtttagggtttgttggttgttttttttttttttgtttggtaggggatttagtgtgtatgttagtgtggaggggtgggttggttggttagttttgggttttttggttattttggggattttttttaagttttgtttttgagtgtttttattggttttggatttttttttttttagttgtttgtttgggttttggggtgtttaggttattatggataaatagtttagggtgtttggttgagaagttaggggtgaggaagttttggggtgttgttgttgttttttttaattataaattaggttggataggagagggaggggtgggggatagtgggtggggatttagattgttagtattttgttatttatagttggggtttttgagtggtagaaagttttggttattttttgttgtttgggttgggtgaaagttaggattgtgttgtgttattgttaggatatggagttattgttgttattgttttgtgatgtagatttgatggtttttgatggttttttttgtttttttgttataatggatgatttttatgatgatttgtgttttgattttttggatttgtgtttttttgaagatttggatttgtgtttgatgtatgtgggtgtgtttttgaaatttgaagagtatttgtatttttttgtggtggtgtatttggttttgggtgtatgtgaggatgagtatgtgtgtgtgtttagtgggtattattaggtgggttgttgtttattgtgggtttgtaaggtgtgtaagtgtaagattattaatgttgattgttgtaaggttgttattatgtgtgagtggtgttgtttgagtaaagtaaatgaggtttttgagatatttaagtgttgtatgttgagtaatttaaattagtggttgtttaaggtggagattttgtgtaatgttatttgttatattgagggtttgtaggttttgttgtgtgattaggatgttgtgttttttggtgttgtagttgttttttatgtgttgggtttgttgtttttgggttgtggtggtgagtattatagtggtgattttgatgtgtttagtttgtgttttaattgttttgatggtatggtaaggttgggattttaggaagtgaggaagttagggtggtgtttgggatattagggatgtgtttttgagggtggggagttggttttgtgggaggtttgggttaggattttttttgagagagaggatttttttgttttgggtagttgttattggggtagtttgttttggaagtgtgtgggtaagtgtttgagttgttttattgggggtgttattagaatattgtagtgtgaatgtgaagatttttttttttatttatttttatttttaaaatgtaaatttgtgttttttggtgattgtttgtttttggtttggttttgtatgttgtagattttattttttatttatttgtaattatttttttaattaggataggtttgggtttggaattagagttttaggttagagttagggagggggtggttataggaattggtgtttgggttttgagttgttttgtgggtttgatttagttgtttttgttgtttgtagatggattatagtggttttttgagtggtgtttggtggtggaattgttatgaaggtgtttattataatgaggtgtttagtggtgggtattttgggtttttttttgtttgtttttttttttttatggagttgttttggtttttatttaggatgtttttatttttatttatatatgtttatgttttgggaagtggtgtaggagatgaaatattaagtaagtagttttttgtttttttgattgttttggattttaattaaagtttttagtttttaatttgttttaaagtattgggtttgggggtgggaggtttgttgtggttttatttttgtttattaattgagttttttttgtgtagaatttaggtttgggaagagtgtggtggtgttgagtttagattgtttgtttagtattgtggagtgtatttttattgagagttttgtggtgtttgtttttttgttggtggatgtgttttttgagttgtttttgtgtaggtaagaggttgttgtttttagtgagggagagagtagtggtgattttatttagttattggatgttgttttgtagtgttttgtgggtgtgaattttaatttgatatattaggtgttttgaggggatggtggttgtttatttgtttgagggatggtgtttttagggttttttgtgtttaaaagattgaatttaaatgttttttttttaatagtgttttaaaagtgattttttttgaggtaggagaggtgggagaattgaagtttttgtttttgttttatagggtaaggatatagtgtggttttttttatgtagtattttttttggagatttattgtgatggttgttttgtgttttttggtgggttagagttgaattttgaggggttaggtttagtttttttgtgtttttttttatgggggtgagatttttgtagatttaattttgttttgggatgtattggttatttgggggggtgtgagatttagtgtattttggttttaaatgtagtaggtgtaattgtaatttatttttaatttgttttttggtttaggattattttttgtaatatttttgtaatttatttttgtaaataagagttgttttgttagagtaggagtttttggggttgtatttatttttgaggtatggtgtgtggtgttatagggaatttgtatgtttatattgtaggtgggtgagttgtgggtgtttgtttaggtgattaaaataaaggtgttaatttatattgttgtggttttggttttttttggatatgggtgtgggattt

SEQ ID NO: 276 - DNA, 3025 bp, Artificial Sequence
  chemically treated genomic DNA (Homo sapiens)
ggattttatatttatgtttagggaaagttggagttatggtggtataaattagtgtttttattttgattatttgagtgagtgtttgtggtttgtttgtttgtggtataaatgtataaattttttgtagtattatatattatgttttagagataaatatagttttaggggtttttgttttggtaaagtaatttttatttataggaatagattataaaagtattataaaaagtggttttgaattgggaaatgggttgggggtgggttatggttatatttgttatatttgggattggagtgtattgggttttatgtttttttaaataattggtgtattttggggtagggttaggtttgtgagggttttatttttatgggggagggtgtgagaaagttgaatttagttttttaaggtttagttttggtttattgaggaatatggagtggttattgtaatgggtttttgagaagggtgttgtgtggaaaaaattgtgttgtgtttttgttttgtggggtgggggtggaaattttagtttttttgttttttttattttaagagaagttgtttttaaagtgttgttgggaggggggtatttaagtttaattttttgggtgtgagggattttaggggtattattttttgggtgggtgggtggttattatttttttagagtatttggtatattgggttggggtttgtatttgtagggtattgtggggtggtgtttggtgattgggtggggttgttgttgtttttttttttgttgggggtggtagttttttgtttgtgtggaggtgatttagaaggtatgtttgttagtaggagggtgggtgttgtagggtttttggtggagatgtgttttatgatgttggataggtagtttaggtttgatattgttgtattttttttgggtttgggttttgtgtggggagggtttggttagtaagtaggggtggggttgtgataagttttttatttttgggtttagtattttgagatagattggaaattgaggattttagttagagtttgggataattgaaaagatagggagttatttgtttagtattttattttttgtattattttttaggatataggtgtgtgtgagtgggggtgggagtgttttagatagaggttaggatagttttatgaaggaggaggagtgagtagggagaggtttggaatatttattgttgggtgttttgttgtagtaggtgtttttgtagtagttttgttgttgggtgttgtttggggggttgttgtagtttatttgtaaatagtaagggtgattgagttaggtttgtgggatggtttgaggtttgaatattaatttttgtagttgttttttttttaattttagtttaaggttttagttttgggtttagatttgttttggttgggggggtaattatgggtgggtaggagatgaggtttgtaatatgtagggttaaattaagggtggatagttattaaggggtgtaaatttatattttggaagtagggataagtagagaaaaagatttttatgtttgtgttgtagtgttttaatagtgtttttaatggggtagtttgaatgtttgtttgtatatttttaaaataggttattttagtgatagttgtttaggataagggggtttttttttttgggaaggattttggtttaaattttttgtaaggttagttttttgtttttggaaatgtgtttttgatattttgagtgttgttttaatttttttattttttggggttttggttttattatgttgttggagtagttggagtgtgggttggatgtgttggagttgttgttgtagtgtttgttgttgtggtttgggggtagtgggtttggtgtatagaaggtggttgtggtgttagggggtgtggtgttttggttgtgtagtagagtttgtaggtttttgatatagtggatggtgttgtgtaggatttttattttgggtaattgttggtttggattgtttgatgtgtagtgtttgagtgttttaaaggttttatttattttgtttaggtggtgttgtttgtgtatggtggtggttttgtggtggttggtgttggtggttttgtgtttgtatgttttgtaggtttatagtaggtagtggtttgtttggtggtgtttgttgggtgtgtgtatatgtttgtttttatgtgtgtttggggttgggtgtattgttgtggggaagtgtgagtgttttttgggttttaggagtgtgtttatgtgtattaggtgtgggtttaggtttttgaagaagtgtaggtttggggagttgaaatatgggttgttatagaagttgtttgttgtggtaaaggagtagagagagttgttgggggttgttaggtttatgttgtggagtggtggtgatagtagttttatattttggtggtggtgtggtatggttttggtttttgtttaatttaagtggtagagagtggttggaattttttgttgtttgggagttttggttgtagatagtaaagtgttggtagtttgaatttttatttattgttttttattttttttttttttgtttggtttgatttgtggttaaggaaagtggtggtagtgttttagggtttttttatttttagttttttggttaggtgttttgggttatttatttgtagtagtttaaatgttttggagtttaggtgggtagttgggggagggggagtttgaggttaataggaatatttgggggtggggtttggggggggtttttggggtggttgaggggtttgagattggttagttagtttgtttttttatattggtgtgtgtgttaggttttttattgggtagggagggagggagtgattggtaagttttaggtggttgatatttggttttttggtatgttttttttaaatttttttaatatttgattgttgtatttgtgggaaatgttggttgtgtgtgtttatttttgagttgatttttaatatttttttgtatttttgatttgtgggggatttatgggtagagtggttgtagaaattaggttgtgagag

SEQ ID NO: 277 - DNA, 11913 bp, Artificial Sequence
  chemically treated genomic DNA (Homo sapiens)
taaagtagggtgttattaaagaaagaaggaagaaattggttaaatgaatttagaatataaataaaattattgtataaataaaatttttgtttatgattaagttggaatggtggttaaaaaagaaaagggaaaaaaaatttttagatgtaggtagatttttataattaagttattttttaaaggggaagtaaatgtgatagaatatttagtaagtaaatttattgaggaatattttgtttttatataattaaatttaatattgaggtaaaattgataattattaaattgagggtagttgggagagggaaaggggatgagataaaatttagtttataaaatattttattattttttataggttaaaaaatataaaagaaatatttggaaagaattgtttaagatggaaagattttaagattgtgtgattttttttttttttttttttttttttttttttttataggtgtagaataatttttttttttttttttgtggttttttttttttttattttttttttttgttgtttgtaaagttgaatttggggttaggagttttaattgtaattttagattggaattttagatggtgtgtttaggattggaagtaatttttagtttattaattttatgggtttatgtatttgttttggttatggtttggtttttatttttattgtggtattaatgtagaataaattgagatatattttttatataattagttttagaatttaaaaagatttatggtataataatagaggtagtgttgtggaatttttttattgaggatttttggggagtttggggattattttgtggtggtattagaatagatgagtaattttagtggttttaggtattgtgaattgggggagagggggaaattttgtattgtatttggtagtatttaatggttttgggtttttagatagggttagtgaggagagttaggatagtaagtggggattggttaaaaaaaattgatttaattttgaaatgattagaagaagttgggagtagttattataaagttttttttttgtttttttttttttttaattgaaggaatgatgttgaaatttttattgttagtgtggggttgggaattattttaaatatttgttttgtagttttgagtgggtagattttgaagagttggagttggtggggaggggaggaatagttgttgggttgttttgtgtgtggggtttggggtgtgggttttggggagaggtgttagttgaaagtttgttttttttttgtgataggtagtagtgaggttgagttattttttattatggtttgtgggttttgtgtgtagtgtggttgtttttgtttttgattgattgtagtgttttggggtgtttatttagttgtttgtggttgttgggtgatttttggagggtggtttaggtgtgtgtattggtttttggggttgtggttgtagtagtttagttttgtgttttgttagatgtagtggatagtgttggggtgaaagtaagggttgagaaatttttattgttttgtttttatttagttttgatttttttatattgtaataattatgtatttttgaggttgggatgtttgtgttttgttagtgtattaatgttatatggttttttaggggttgtttttgtttttgtattttattagttttgaagaggtagaggggtggtgggtaaaatttttaattggatgttgagagatttgggttttagtttggtgttgttattaatttgttttttgtttttaaatagtagtagtaataaaaattgtaaagttgattgagttaaaggtttatattgtttttttatttaatttttagaataattttatgaggtgggtgttagtattttattattttgtttgattagtaaggaaattgaggtttagagagattgtggaatttgtttagggttatatagttgttggttatttggtagagttgaggttttattttggggttattaattttttgttttttattgttgtgttttatagattgttttttttttggttgtttgggttttagtttttttttttgtaaaatgagaagtttaatttgtagttttttttgttaattggtggtttagattaggaatttttgttatagattttggtgttgataggggtaagaaggtgggtgaaagaagggggtgtttagttttttatagtttgtttttttttgggattttgtgaagggtgggttttgtgagttaaaggaggtataggagagtgtttattgtttgtggtgggtgaaggtgttatttgtttttgtgttaggttgtgagttttggtgtttagtttagggtgttaaggttagtgtagttggtatgttttttttggaaaattttaggttttttgtagagaatgttatttataataaagaagaggatagagaggtatggagtgttttgtgattgtaggagtatgttagttttttagtgttggtttagtgttgtttgggtttttgggtatgtggatttgttggggttgtatggagattttttgttgggtttttggggttttttgattgtggttttttagtttagtattttttttttggttttgtaggttgtagggaattttttttatttttttagttggagaagtttaagttgggtgagggggtattttggggtttgtattggtgttttttttttttttgtttttataaggattttgagaaaataaatggtagaggagagaggagttttatatttgtttggtttttttttttttttatttatttttatattttttattttggggtaaaaatttatttttgaaaaatgttggtagagatttatgtgtttttgttttatttgggttttataaatataatgatttatatttaagttagtttttttttagataattttttttttttttgttaaaagtgttaaggatggtaaaagaagaaataattttaatttttttgtttggaaatgaaagtttttggttttttataaagggttttttgttttttatagttgagttttagttaagaaaaatgatttttaagtagaaataataggtggggagaaggaagggagatatagggatttggggggtttttagggtaattggtagtgaattttgttttgagagttttttttttatttaaaaaattaaatgtgtgagttttgtgaaaggtttagggatagattgtgtgggagaggattgagtagagagtgtgggggtagtgttttgtagaatttttttttttttaataataattttaaaagtttttgagtggagatgatgtaaagttaagtagtaaaggtggtttgggaggtaagtggagggtttaagtgttgtatttttatttttagggttttttgtgtttatgggatgtgtatttttaagaagtgtgttttttgagtaagttttgggtttgtatatattttgggtttgtagttagaatttaatggtgataatgtttatgtaatgtaagttaaaaattaaagtgtaaaaaattattatgttatttattgaaatgttattttttgttaaattgtaattattttgttttatataagtttggttggaaagtttgtagttttagtttgggttagttaggtataggaggttggattgtaattggttgttttttttttgttgtgtttggttgttttatgttgtgttgttgttgttgttttttggtgtttttgggattttatatgtatttttgaaatatgttttgttttggtttttggtttttttttttgtttaggggttgttttttaatagatattgatttttttagaagatttaaaaattaaattaaaatattttttatttgttttaaatatttgttttggggtgtgggggttgttaaatagagattagatgaagggagttagatttagtgaagttttttgagtttttaaagatttgaatattaatttgtgtttgtgggttgatggaggttttttttattttattttttggtttttttaattggtttttgttttttggttaattattgagtaattagaatggtatttttgattagggttataggtagtgtttggtggagtggttttaggagttatttgttttttgttgggttttgtatttaaatttttttttttattttttttttttaaattgggtgttaggatgttttggttggaatatatgtaggttttgggtgtttgtttaagggttttttttttttttaaattagttgttgtttttttggtttaattgtagaagaattagatattttttattggaaagggaaattaagtgttgttgattttaattttaggtaggtggtaattgttttttgtttggtgtaaattttattaagtaaataattattagttgattgaaatatgtttggtttataattggtgtaatttttggttatttaattgagggatgtttgtttttagttttgatttttggaatttataaagggttatttttttttttagtgattttaagattatggttatttttttatttgatagttttagaagtaagagttagatttaagggtgtaaagtaagggtatatgtttttttgaagtttgattgagttttttttgtgtttttttgaagtttttgtttttttggagtttatttgtttttttttttaaattatttttttagattaataattttatttttatttttattgtatttgattttgtttggatttattgtttatttgaatggattttttagtgagatgaggtttttatattggtgaaggttaagaaggggaggtggggggagggttgtgttatattggttagttgagagtgtgtgttgggttgaagaggagggtgtttttgagagggatgtttttttggatttgtttttattttagttgtgagggtgtttttaaggagtagtgtgtgttgtttggttgggtttgggttgttgagtgaatggagtggttgagttttttggtttttttttttttttgtgttgttggttttttttatttgagttttgggaagttgagggtagttaggtagttggggtaaggagtttaaggtagtgtttatatttgggggttttttgtaatttgattgtttgtttgtttttttattttttgtttttttttttatttatttatttatttatttatttatttagagttgggatggtagtttaggtgtttgggttttgttgtttttttgttgtgattttggatttttttttgttgtaggatttggtttttatgtgtgttttggagttggtgttttagtatatgttttgttttgggtttgggtgtttatagtagttagagtagtagggagtttgggatttgggtggtatttgggttaagttaggtgttgttgaggttagtgttgaatgtttttagggttggaggagttgtggggtgtttgggtttgagttgtagtaaatgggttttgatgtgtgggatttgaatgtgttgttgtttgttgttttttttttgggtggtggtggtggttgtgttttgtttgtgagtggtgtggtgtagtgggtgttggtgttggattttgtgtttttgggtgttttggtttatgggttgttgggtggttttgtgttgttattggttttgttgttatttttgttgttgttgttttatttttttattaaataggagttgagttggggtggtgtggagttgtatgaggagtagtgtttgagtgtttttattgtttatttttttggttagtttattggtatagttggagtttgttgttatgggttttttggtttttttttgtttagttaggtgttatttggttaggttaggatgttttttaatgtgttttatttgtttagttgttttgagagttagtttgttatttgtaattagggtaagtaggttggggagtgttttttatgtgtggggtagtggtgttagggattttttgttttaggatattttttttttttattttttttgattgtagtttttatttagttgttttttaagggttgtgaggatagtggaagtggtggttggggaggaggttggagagtgggagtgtatgtaggtattggtttttgatattttttaaagttaggtagagttaggagtttgattgtttgtaagagttgggagggtgtttggggttttttagagtttgagagattttgggattgttagtttttatgggagtggaattaggagattggtgtagtgtttggttttgttttggggagagttttgttaattaaggaaatgttaaattgttattaagtgtagtgttttttagatgtttggattttggatttggagtgggattagtgtgggggtgagtgtttgtgttgtgttgtttttgtagtgttaaaatgtttaggagtatttttagtttttataatatggtgttggtatatatttaggtgtatattaagtattgtagagaattagaatgagtatatgtatttttagtaattaaatggttttttggaatagtgttgtgtttgtggatagtttttgtgtatggtaatatagaagtggatttttattgggttttgtttaggtggtggttatgtaggttttggggatggaagagaatttgatttatttgagtttaagttatgtgggattaggttttattgtaggtagtggaaggaggtatgagttttggttttttttttagtgtatttggggtgtttttttattttgtaaatgtggggtttagttgggatagtatttttttaagatttggggttagaataaggatagggttatttgttgtgtttagttaggatataaggagggaatttggtatatgataagtattaggttggttttttattttgtgttgatgtttgtttattttttttttgtttgggtggtgtggatttgaatttgtggagtttttgtagtttgttttttttatttatttttagtggatttttatgttattgagaatttaagttagtttggtttgatttggtaatttagtaaatgttttattaatataatggtggatgttttttttggagtaaaattatttgagggtttagggattgggatgtttttggaatgtgtgggaagtagagtgtattttttgtaggaggtatttttgtttaaggtttgggagaagggttttgtttttgttgtttgtttttatttgtgttttttaaatgtgtgtttttaggttgtttttattttagtttaattaggagtatttggtttttgtgaagttttggagaaattgaaattgtttttttttttgggagaatttgggattattgttttgtggaggaattgtaagtagatttaagggttgtttttattttatgtttttagttagtgaaattagtgttttgtatttaaggggtgttgggataatttattggttgttgaggtttgtgttttttgattagattgtgttatttttgtttagtaggttggtgttatttttggggagtttttaggttttagtgtttttgtttataagaggatagttgagatgggtaatttggagattgggtttggtttgaagttatattttatagatgtagaagtgttatttattatttttttggggttttaaatatggaatttggtaatttatttaaatatttgtgattgagaaataatgaatttgagagtattgtttgtatgtgtgttatttggaggtggttgagaaattattgaatttatgtttttggggtataaaatattattatgttattatttttttagtatttttaggggatttttgaaatttgggttttgttgttttgtttgggttttttgtttagttttttttagggtaggtttggtgtttgggattttattatatgttgtggggggtgggattgtgggttttgtagttagtaggtattatatttttggaaaatatttggatttttttgtaatatataggtgtggttgttatggagaaaaagttaaaaggggattaggattagtaggtgaatgtattttttttttttattttggagaaaaagtttaatggagagagggttttagatttaagttatatagtttggaagtattatttttaggtttaagttttgttttgtagtgaaaatagatgggtttattttatttagtttttgaggtttattgggtagtttggatgtgagaagtgttttggttgttattttggagtgggtaagggtggtttttgagattttgggtttattttttggatttttagggtttttgttgtttttttaggaatgtagggtttggtttaagatttgggttgtgagaggtaagggtattaatttttaaaaatgtggaaatggttattagagtgttaaggttaaattttaggggagaggaattaaggttgtttttggatttttagggtagtttagttatggtgtataggtaggggtaattgttggtatttatttataattgtttaaaattttataagtatgtttatattttaaatttttaaatattatattttgtattttaattttgtaaatattaatttagtaaatattaattgtttatttggttaggtattgggttttgaatattaattaagataatggttttgagaatttttgtaagaagtttattagttaattttggagaggttttttgttttggatgaggaaatttaggttttatgagattaggtggtagaggtgggatttgaatttagattatgttagggtgtttttattttttttttagggattttggttttattgttgagatggattttttttggtttgtgggaggggtattaaatttttagtttatgtgtgggggttgatgggtttgtgagggtagatgtggggtgaggatttgagtagttttagattagatgtaaggtttaaggaggaggggaaaaaagtttgtttgggttggatgtggtggtttgaggtggttggattatttgaggttaggagtttgagattagtttggttaatatggtgaaattttgtttttattgaaaatataaaaaaaaaaattggttgggtttggtgatgggtgtttataattttagttatttgggaggttgaggtataagaattgtttgaatttgggaggttgaggttgaagtgagttgagattgtgttattgtattgtagtttgggtgatagagtgaaattttgttttggaaaaaaaaaaaaaaaaaagaggttgtttgttagtttattgattttgtagttttgtaggtttgtagaattttaaggtatgattaggtttgggattattaggttattttagggttaggtgtggaggtttgtgatgtttgagggttaaaggtttttttttttggttatataggagagggtattttgttgggggataggttttttttaattatagtgtagttgtagttattgtttttagttttttgagtatttttttggttgagtttgttgtttattttattttttagtttttatggtttggttaggttaggtggtttttggtttttttgtagttgttggtgggggaggagggtatagagtgtgttttgttttttagtgtatggttaaggttgtgttttttttttgggttgggattaattgtgggaaaggtgttattttggttatttgattttttttttttaaggtttgtataaggagtttttgaatatgttgttttttttagttggtagttttattttttttggtttttgtttttgtattttttgtgttaggttaagtgttgggtttagggatagtgtgttttaattaaatttgtgtttgataagtttttaattaaaagagatttttttttgttttgtaggtgtttttattattgttttttttggggggatttgaaggagagggtttgaggttggtttttgtttgttgaggtttgtgtgtttggtttgggaggaggtttaggagggtttgtgggttatgggtatttttgggtttgagttttggggtgtggatggatgttttgagagtgggtgttgtgatttgggatttatggtttttgttgggtatggatagttgtggagtagggttttgaggattgtgtagtgttttgggtttttgtttatttttgggtttaggaatggagaagggtttgtttagagaaaatttttttgtagtttttattttgtttttttttttttttttttttttttttttttttttttttttttttttttttttttttttgtgtttgtttttttttttttttttttttttttagtgtttttttagaaatttggtttttattttgggtaatagtgggtgttttgagttaaattttgtttgtaagtttatttataggttttaaagaaggttaggttttaggttttaaaaggaagtttgtggaagtttaaatgtgtttgtttatgtaggagagttaatggggttgggggttatttttgtttatttagtaggagagaaatggaggtttttgaggttatatgataaaagttagtggttttttaaatttttagtgtgtggtgttgagtagtgtgtgagatttaagtttggatttgtattatttgggagttaggatttgtttttttttttttttttttgtattttgttatattattttttaggtttatgtttttgttgttttagagaagttttttttttttttttttttttttttttttttttgggtggggggtggtggtgtgtgtgtatgagtgtttgtgtgtgttttgaaaatggaggtaatgatgttttgggttttgtttattggttgagttttgtttaagtttttggaggtattttggttaaatagtgtaagagtgggagaatgggtgttgtttgatttaatttatttttgagaattttgtgaagtttggagatttagggtagttttgggttaggaggatttgaggttgttggggtggttttgttaggattttataggagtagttttttttagttattgtgtttggattttaggttatagattttggaatttgtagaggaatgagattttatttttgggttttggggttaatgatgtatttttagttgaaggatttttttttttagaggtagtaatagttttttagaagtttgtggggtataagtttaaagtaatttaataataaaaattataaaagattatgttttttaattgaggttttatgtttttttttttattttgggggggggggggaatgttaggatttttttagggggaaattgaggtaaaggattgaagtattattatggagggaaagggagatatagtgttaggtatattttaaaggaaattggttgtttagtttggggagtgaggaagttggtttttatagtagtggttagggttggatttttgggtgtaaggtgggttttataggggggaggaggaggagagtgtagggttgttatttgaaggtttaattggaaggggtttttgtttttttttttattagtttttttttgggtgttatggtgttaggttgggtagttttagatagataatattatttggtaattattttttttatttttaagattaggttatttaattggttttgagtaattaatgaaagttggtgtgtgggtttttgatttatagtttggagttaatgtggggttagtttagtagatttattttgtttgtttgtgttgtttttgtggaagagttgtagtttatttttggggggtgaataattttttttgttgattaggtaatgagttttatatttaatttgttaggggtttgttgtagaagtggtagagattgtagaagattgtggtataaataaattgggaaaaagtgaggtgggggttttagttagaaaaggatggagaagtttgttttaaggttatatttagggatttgggttgtttttttgttgaaagttttggaggtttgtggggttggatttttttttgttgggggtttgaatgtggggtttagtgtatattttttttgtttgtggttggtttagatttattgttttgttttgtgagagtattgttgatattgtgtttttttttgttgtttttgtagg

SEQ ID NO: 278 - DNA, 11913 bp, Artificial Sequence
  chemically treated genomic DNA (Homo sapiens)
tttgtgggagtggtggagagaagtatagtgttagtggtgtttttgtaagatggggtagtgggtttgaattagttatgggtggggggggtgtgtgttgaattttgtatttggatttttagtggaggagaatttagttttataagtttttaggatttttggtaggaagatggtttaagtttttggatgtgattttgggataggtttttttatttttttttgattaaaatttttattttgtttttttttaatttatttatgttgtagttttttatggtttttgttgtttttgtagtgaatttttggtaaattaagtataaaatttgttgtttgattgatagagaaggttgtttattttttaaaaataaattgtagtttttttgtaggagtagtgtgggtaagtgaaatgaatttgttgggttaattttgtgttgattttgagttgtaaattaggggtttgtgtattaatttttattaattatttggagttagttaaatggtttggttttaaaaatgggaagagtaattattgagtaatgttatttgtttggggttatttgatttgatattatgatatttaagggaaagttggtgagggggaaaataagggttttttttagttgggtttttagatggtgattttgtgttttttttttttttttttttatgggatttattttgtgtttaggggtttgattttgattattgttgtaggagttaatttttttattttttaggttggataattaattttttttagagtgtgtttgatattgtatttttttttttttttatggtagtgttttggttttttgttttagtttttttttagggaaattttagtatttttttttttttttaaagtgagaaaaagagtgtggagttttagttggaaaatatagttttttataatttttgttattaaattgttttaaatttatattttataagtttttggaaagttgttgttgtttttggggaaaaggattttttggttaaagatatgttattggttttggaatttaaggatggggttttatttttttataagttttggagtttgtggtttgaagtttagatataatggttaaggagagttgtttttatgggattttggtagggttattttagtagttttagatttttttggtttaggattgttttgggtttttaaattttataaaatttttaggagtaaattgggttaaatagtatttatttttttatttttgtattatttgattaaagtgtttttaaagatttaagtaggatttagttgatgagtaggatttagggtattgttatttttatttttgaaatatatatggatgtttatgtatatatattattattttttgtttagaaaaaaaaaaaaagaaaaagaaaaaaaaaaagtttttttggggtaatagaggtatgagtttggagggtggtgtggtagagtgtaagggagggaaggagggggtaaattttaatttttggatagtataggtttaggtttaagttttatatattgtttagtattatatattggggatttgagaagttattagtttttattatatgattttgagggtttttattttttttttgttaagtgggtaaagataatttttggttttgttagtttttttgtatgggtgagtatgtttgggtttttatagatttttttttgaaatttgaggtttggttttttttgaggtttatagatgagtttataaatgaaatttggtttagggtatttattattgtttggagtgaaggttgaatttttgaaaggatattaaaaagagagagagagaaagagagatagatatagagagagagagagagagggagggagagagagagagagagagagagagagagagagagatgaaatagaagttatgaagaagttttttttagatgaatttttttttatttttgagtttaggagtaggtagggatttagggtattgtataatttttagagttttgttttgtaattgtttgtgtttggtgagggttgtgggttttgagttgtggtatttatttttgagatgtttgtttgtattttagaatttgggtttaaggatgtttgtggtttgtgagtttttttaggtttttttttagattggatatgtagattttggtgggtaaagattggttttaaatttttttttttaggtttttttgggaggggtagtggtgaaagtgtttgtggagtggagggaggttttttttaattagaagtttattggatatgggtttgattagagtgtgttgtttttgggtttagtgtttggtttggtgtggagagtgtgggggtaggggttaggggaggtaaagttgttggttggaaggagtagtgtgtttaaaggttttttgtataggttttggagggagagaattgagtggttaaggtagtgttttttttatggttagttttggtttgggaggggagtgtaattttgattgtgtgttaagaggtgagatgtgttttgtgttttttttttttgttggtggttgtagagaagttgggaattgtttggtttggttgggttgtgagagttgaggggtgaaatggatagtaggtttagttaggaaggtgtttagaaggttgaaaatgatgattgtagttgtattgtgattggggaaaatttgttttttaataaaatatttttttttgtgtgattggaagagggagtttttggtttttgggtgttgtaggtttttgtatttgattttagggtggtttgatgattttaggtttaattatgttttagggttttgtgagtttgtggggttgtgggattagtggattagtaggtaattttttttttttttttttttttttgagatggagttttgttttgttgtttaggttgtagtgtagtggtgtgattttagtttattttaattttagttttttgggtttaaatgatttttgtgttttagttttttgagtagttgggattataggtgtttgttattaagtttggttaatttttttttttgtatttttagtagagatagggttttattgtgttggttaggttggttttaaatttttgattttaggtgatttaattgttttgagttattgtgtttggtttaagtaagtttttttttttttttttttaagttttgtatttagtttggggttatttaagtttttattttatatttgtttttataaatttgttaatttttatatatggattaagagtttggtgttttttttgtaggttagaagaaatttattttaatggtggggttaagatttttggaaaaggagtagaaatattttagtatggtttgggtttaaattttatttttgttatttaattttatagaatttggatttttttatttaaaataaggggtttttttaggattagttggtgagttttttgtaaaggtttttgaggttattgttttaattaatatttagaatttagtgtttgattaagtaggtgattgatgtttgttaaattaatgtttataagattaggatgtaagatataatatttaagaatttaaaatatgaatatgtttgtgaagttttgggtggttgtgagtgggtattaataattgtttttgtttgtgtattatggttagattgttttagggatttagagatggttttgattttttttttttggggtttggttttggtgttttgatggttatttttatatttttgagagttgatgtttttgttttttatagtttaagttttgggttaggttttgtatttttggggaagtagtaggaattttggaaatttaaagaataaatttagaattttgagggttatttttgtttattttaggatagtagttggagtgttttttatatttaagttgtttaatgagttttaagggttgggtaagatggatttatttgtttttattgtaagataaaatttaaatttggagatggtgtttttaggttatatgatttgaatttagggttttttttttattgggttttttttttagggtggagaagaaggatatatttatttattagttttggtttttttttaattttttttttatggtagttatgtttgtatattatagaagaatttagatattttttagaagtgtaatgtttgttggttgtaaaatttatagttttattttttatgatatgtgataagattttaggtattagatttgttttgaaaagggttggataagggatttaaatgaagtgatagaatttaggttttaaaaattttttagaagtattaaaaagataatggtgtagtagtattttgtgttttaggggtatggatttgatggttttttaattgtttttaaatagtatatatgtagatagtgtttttggatttattgttttttagttatagatgtttagatgggttgttgagttttatatttaaagttttaagagggtggtgggtagtgtttttgtatttatggagtataattttaagttggatttaatttttaggttgtttattttagttgtttttttatagatggggatattgagatttagaaattttttaaaagtaatattagtttgttaaataaaggtggtgtgatttgattaaagaatataagttttagtgattagtaagttgttttaatgttttttgagtataaaatattaattttattaattaaaagtatagagtggaggtaatttttgggtttgtttgtggtttttttataggatagtgattttagatttttttgaagaaaagggtggttttgatttttttaaggttttgtgggggttgggtgtttttggttaggttaaggtaggagtggtttgaagatgtgtgtttagaaggtgtgggtgaaggtgggtaataagggtagagttttttttttgagttttgggtgaaggtattttttgtaaaagatatattttgttttttatgtattttaaaaatattttggtttttaggtttttgagtaattttgttttaggaaaagtatttgttattgtattagtaaagtgtttattaaattattgaattaaattgaattggtttaggtttttaatagtgtggaaatttattgaaaataaatgaagagggtaaattataggggttttgtaggtttgggtttgtgttgtttaggtgaaagagaggtgggtgggtattggtgtgggatgagaaattaatttgatatttattgtgtgttgagttttttttttgtattttgattaagtatagtgaataattttgtttttgttttaattttaggttttgaagaaatattgttttagttgagttttgtgtttataagatgaagaggtgttttagatgtgttgaaagaaaggttaaagtttgtgtttttttttattgtttgtggtagaatttggttttgtatagtttggatttggataagttaagtttttttttatttttagaatttgtgtggttgttgtttgagtgaagtttagtgaagatttatttttgtattattatatgtgggagttatttatggatatgatgttgttttagaaagttatttagttattggaggtgtatgtgtttattttagttttttatgatatttaatgtgtatttaagtgtgtgttaatattgtattataagggttggaggtgtttttggatattttagtgttgtggaggtagtatagtataggtgtttatttttgtgttggttttattttgaatttagagtttagatgtttgaaaagtgttatgtttggtgataatttggtgtttttttaattaataaaattttttttaaggtagagttagatattgtgttggttttttggttttatttttgtggggattagtagttttggaattttttggattttaaggggttttagatgtttttttggtttttgtgaatagttaggtttttagttttgtttggttttggaggatgttgggggttagtgtttgtgtgtatttttattttttggttttttttttagttgttgtttttgttatttttatggtttttgggaagtagttgggtaagagttgtggttaaaaggggtaggagaggggggtgttttagagtggagagtttttggtgttattgttttgtgtgtagggggtgttttttggtttatttattttgattgtgaatagtgggttggtttttgaggtagttgggtaggtagggtgtgttaggaaatattttggtttggttggatgatgtttggttgggtggaggaggattgaagggtttgtagtgataggttttggttgtgttagtgaattggttggaaaagtggatagtgaaggtgtttaggtattgttttttgtgtggttttgtgttgttttagtttggtttttgtttgatgaaggagtgaggtggtggtggtgggggtggtggtggagttggtggtggtgtggggttgtttaatgatttgtaagttgaagtgtttgggggtgtaaagtttagtattggtgtttattgtgttgtgttgtttataggtagggtatagttgttgttgttatttagggaggggatggtgggtagtagtgtgtttaggttttgtatgttggagtttatttgttgtggtttagatttggatgttttgtggtttttttggttttggagatgtttagtgttggttttggtggtgtttaatttggtttagatgttgtttgggttttggattttttgttgttttggttgttgtaggtatttaggtttggagtggagtgtgtgttgagatgttggttttgggatatatgtggaagttgggttttgtagtaagaggaagtttaggattgtggtgaggagatggtggggtttgggtgtttgggttgttgttttggttttgggtgggtgggtgggtgaatgagtaggtgggagggagggtgggaagtgggggagtggataggtggttgggttgtggagagtttttgggtgtgggtgttgttttgaattttttattttagttgtttggttgtttttagttttttaaagtttaaataagaggggttggtggtgtggggaagaggaggagttaggaggtttggttgttttatttatttagtagtttaagtttggttaggtagtgtgtgttgttttttgggggtgtttttgtagttggggtgagggtgggtttgagggagtgttttttttggagatatttttttttttaatttaatatgtgtttttagttggttggtgtggtataattttttttttattttttttttttggtttttgttagtgtgggagttttgttttattggagagtttgtttaggtaagtagtgagtttgggtagggttgaatgtggtgggagtagagatggggttgttaatttaaaagagtggtttggagggaggggtaggtaggttttaagagggtgggaattttaggaaagtgtagaaagaatttagttaagttttaaagaagtgtatatttttgttttgtatttttgagtttggtttttgtttttagaattgttgggtaggggagtggttatgattttggggttattggggaaagaggtggttttttgtgggttttagaggttgggattgaaagtgaatgttttttagttgggtggttgggagttgtattagttataagttgggtgtattttgattggttagtagttgtttatttggtgaggtttgtgttaggtggaaggtggttgttgtttatttaaaattggagttagtagtatttagtttttttttttagtgaggaatatttaatttttttatggttaagttgggaaaatagtggttagtttaggagggaagaaaatttttgggtaaatgtttaaagtttgtgtatattttggttggagtattttggtgtttagtttggggaggaggggtgaaggggagggtttggatatgaagtttggtagggagtgggtaatttttggagttattttgttgagtattgtttgtggttttggttgaggatattattttggttgtttagtgattgattaggaggtggaagttagttaaggggattaaggagtggagtagggagaatttttattggtttatgggtgtgagttagtgtttgaatttttgggagtttgaagagttttgttaaatttgattttttttgtttagtttttgtttggtagtttttgtgttttagagtaggtgtttggggtgggtagggggtgttttggtttggtttttggattttttaaaggagttagtatttattgggaaataatttttaggtaaggagaagaattgggggttggagtggagtgtgttttagaggtgtgtataaaattttaggggtgttaggaggtagtagtgatggtgtagtgtgggatggttaggtgtgatgggagggaagtaattggttgtagtttggttttttgtatttggttggtttgggttggggttgtaagttttttagttaaatttatgtgaagtaaagtagttgtagtttgataaagaatggtgttttaataaatgatatagtaattttttatgttttggtttttagtttgtattgtataaatgttgttgttattaaattttggttgtggatttgaagtgtgtgtgggtttaggatttatttgaagggtgtattttttgggaatgtgtattttgtaggtgtaggagattttgagggtaaagatgtggtatttgagttttttgtttgttttttaggttatttttgttgtttgattttgtgttgtttttatttagaagtttttaaaattattattaagaaaagaaagattttataagatattgtttttatgttttttgtttagtttttttttatatgatttatttttaaattttttgtggggtttgtgtgtttggttttttgagtggagaaaggatttttgagataaaatttattgttagttgttttaagaattttttagatttttgtattttttttttttttttttgtttattatttttatttggaagttgttttttttaattaggatttaattgtgaggggtgaggagttttttatgaaaagttggggatttttatttttaaatgaaaagattgagattgtttttttttttattatttttggtatttttagtggggggagaggaggttatttgaagggaggttggtttgaatgtgagttgttgtgtttgtgaaatttaggtaaggtaaagatatgtaaatttttgttaatattttttaaaaataagtttttgttttggggtgagggatgtaggggtggataggaggaaaggagagttaagtaaatgtagaattttttttttttttgttatttatttttttagaatttttgtgggggtggggaggggaagagtattggtgtgaattttggggtgtttttttgtttgatttggatttttttgattaaagaggtgggaggagttttttgtagtttgtggggttaagaagaaagtgttaagttgaggagttgtagttggaggattttagggatttgataggaagtttttgtatgattttaatggatttatatgtttggaagtttaggtgatattaagttagtgttggggaattgatgtatttttgtagttgtagggtgttttatgtttttttgtttttttttttgttgtgggtaatgttttttgtgggagatttgaggttttttaagggggatatgttagttatattggttttggtgttttgagttaagtattaggatttatagtttagtatgaaggtaggtagtatttttatttgttgtggatgataggtgtttttttgtattttttttagtttgtgaggtttgttttttgtgaggttttagagaaaagtaggttgtggaaaattgggtgttttttttttttatttatttttttatttttgttagtgttgagatttgtagtagaggtttttggtttgaattattgattggtaaagaaagttgtagattaaattttttgttttatagagaaggaaattgaggtttagatagttgaaggagaggtagtttatggagtgtagtggtaaagagtaaggggttggtggttttagaatggaattttagttttgttaggtaattaatagttgtgtgattttagatgagttttgtagtttttttgagttttagtttttttattggttaaatgggataatgggatattagtgtttattttatagagttgttttgaggattagataggagagtagtgtgggtttttgatttaattaattttatagtttttgttattattattgtttaaggataggaaataagttagtggtaatgttgagttgaaatttgggttttttaatgtttagttggaggttttatttattatttttttatttttttagagttaatgggatgtagaggtgaggatagtttttggaaaattatgtggtgttgatatattggtaaagtgtaggtattttggttttgaaggtgtataattattgtaatatgaaaaaattgaggttgggtaggagtagggtagtgaggattttttaatttttatttttattttggtgttgtttattgtatttgatagagtgtggagttgggttgttatagttgtaattttagggattagtgtgtatgtttgggttgttttttgggagttatttagtggttgtggataattgaataaatattttaaagtgttgtggttggttaagggtggggatagttatattgtgtgtggggtttgtaggttgtaataaagagtggtttgattttgttgttgtttgttgtgggagaggaataagtttttgattagtgtttttttttggggtttgtgttttgagttttatgtgtaagatagtttaatagttgttttttttttttttgttgattttaattttttggaatttgtttatttggggttgtagggtaagtgtttaggatggtttttagttttgtgttggtggtgaaaattttaatgttatttttttaattaaaaaaaggggggggtaagggaggggttttgtgataattatttttagttttttttgattattttaaaattaagttgattttttttaattagtttttatttattgttttaattttttttgttgattttatttgggagtttggaattgttaggtattgttgaatgtggtgtaaaattttttttttttttttagtttgtagtgtttggagttgttggggttatttgtttgttttgatgttattgtgagatggtttttgagttttttgagagtttttagtgaaaggattttgtggtattgtttttattattatattgtaaatttttttaaattttggaattaattatatagaggatatgttttaatttgttttgtattaatgttatagtggggatggaggttaggttgtggttagagtagatatgtaggtttatgaaattgatgaattgagagttgtttttagttttgagtgtattatttggaattttagtttgaggttataattagaatttttgattttagatttaattttgtaaataataggggaaaaaaatggggaaaagaaaaattatgagagagggaaaaaaaattattttgtatttgtaaaaaaaaaaaaaaaaaaaaaaaaaaaaaaaaagttatataattttaaaatttttttgttttagataattttttttaagtattttttttgtgttttttaatttataaaagataatggaatgttttatagattggattttattttatttttttttttttttttaattgtttttagtttaatagttgttagttttattttagtgttgaatttaattatataggaataaaatattttttagtaaatttgtttgttaaatattttgttatatttattttttttttgagaaatggtttaattatagaaatttatttgtatttaggaattttttttttttttttttttttgattgttattttagtttaattgtaagtagagattttatttgtgtagtaattttatttgtgttttaaatttgtttagttaattttttttttttttttttagtaatattttgtttta

SEQ ID NO: 279 - DNA, 4316 bp, Artificial Sequence
  chemically treated genomic DNA (Homo sapiens)
ttgtagttaataaaaaaaaaaaaagaaagaaagaaattggtttttgttttattttatatgtttaggtataatttttttagagaagaagaggaggggggtggggaggagtaggaggaggaggaaagaaggaggagaaggagaaggagaagaagaggaagaggaagaggaagaagaagaagaagaagaagaggaagaggaagaggaagaagaagaagaagaagaagaagaagaagaagaagaagaagaagaagaagaagaagaagaagaagaggaagaagaggaagaagaagaaattgtttttagatttttatttttaggataagtttattgtttggtattaagttttttggggtgaatttttttttaaaagagtttggggagtttaggtatggaatgggaggtagaaagtttaattaagggattgggattttggaatgaataatgaagggagatggattgggtttatgttgaaggtttttttttggttttttagtttttgggtgaagatttagggagatattgagatatattttgtataggagggggagggggagggggagggtaaagttttagggttttaggagtggtttttaagggtttaggttttgaggtggtgtttggggttggaaggtttagtattgagaattttttatttttttagagttttttttttttttttaatttgtgttaggttttttattttggatatttataatgtggttttattttttatttttattgggtgttgtgtttttagagaagttaattagtgttgttgtagtttttaggttttaaagttttatgtattttgtgggatttatattttttttagatgtggaggttggggttatggtgttttgaagtttttttttgttgtttttaggggttttggttttgattgatatttgggtgggtgagtgtggggtttagagagaaatggtttttgtggggaggagtgaggggtttgtttggtgggggtgtaggatttagggagttgtgtttggaggagggtttggtgggttttattttttttttgtttttaggtttttattttttgaggtattttagtattgttgtgttgtggtttggttgtggggagttttgttatattgttgtggagtatgtagatgatatgtaatttttgtggtttgatagtgatgttgtgattttgaggatggagttgtgggagttgtgggtggagtaagaggggttgtagtattgggagtggattatagggtatgttaaggttaatgtatagattgattgagtggttttgaggaatttgttttgttgttataattagagtgaggttggtgagtgaatttggttgggggtgtaggttatgattattttttatttgttatggattgtttgggtttttttgagtttttggatttgaaatttattttgaggtagtggatttgtttagattttttatttgggagagttttaggtgtttttattgaggtttatttttagtttaggttaaaatttttgtgggttgggtggggagggggtggggttagttgggtggggttgattgtggggattggttagggttttatattttttagggaatgaatggttgtgatatggggtttgatggatgttttttttgtgggtattattagtatgtgtatgatggtaaggattatatttttttgaatgaggatttgtgtttttggattgtggtggatattgtggtttagattatttagtgtttttatgaggtagaggaatatgtagaggagtttaggatttatttggagggtgagtgtttggagttgttttgtagatatttggagaatgggaaggagatgttatagtgtgtaggtattaggggttatgggtgttttttttattttttgtagattttttgggatggttttgtataaggttgggaggaaagtgggtttaatgttaggatattgttttttttttagttttgagtaggaagaatttttttggtttttgagatttggtattagagagtgattgtgagagtttgttttgttttttgggataattaagggatgaaatttttgagggaatggagggaagatagtttttggaatattgatttgtggttttttttgagttttttaatagttttgggttttgtgattttttttttaagttttgttttttgttttatatttaatgtgtttggggttttgattttagttttttggtttttatttaggttagggttagaagtttttgttttttatttagagatttgaattttttaaggaataggagatttttttaggtgtttgtgtttaggttggtgtttgggttttgtgtttttttttttattttaggtgttttgtttatttttaggttggttatatgggtgttgttggggttttttatgaggagtgtaaagtgtttgaattttttgattttttttagattttttaaaggtatatgttgtttattattttatttttgattatgaggttattttgaggtgttgggttttgggtttttattttgtggagattatgttgatttggtagtgggatggggaggaatagatttaggatatagagtttgtggagattaggtttgtaggggatggaattttttagaagtgggttgttgtggtggtgttttttggagaggaatagagatatatatgttatgtgtagtatgaggggttgttttagttttttattttgagatggggtaaggagggagatgggtaaagaggggaatgaggggttatgtttttttttagggaaagtaggagtttttttggagttttttagtagggttagggttgaggtttggagattagggttttttatttttttttttttttttagagtagtttttttagtttattatttttattgtgggtattgttgttggttttgttgtttttggagttgtggttattggagttgtggttgttgttgtgatgtggaggaagaagagtttaggtaggaaggggtgaggagtggagtttgagtttttttgttttattgggggttgtaagttttaagtagaagtgtgttttgttttattattgggaagtattatttatatttatgggtttatttagtttgggttttgtgtgttagtatttatttatttgtaaagtttttgtgaaaatgaaggatagattttttattttgatgattatggtggtgatgggatttgattttagtagttataaattataggggaaggtttttgttgatgatagattttaggagggtagttggtttaggatttatatttgttttttttatattttttgattttgttttggatttatagttatatttttttggaaatttttttgggattaaagattaggggtttgttttaggattttatggttttgttttttttttggttttttataggatattttttttttatagatagaaatagagggagttatttttaggttgtaggtaagatgaaggaggttgatttttgagattgttgggatattgtggttaggagtttatgagggagtttatttattttatagtttttttagttatatttgtgggttttgattaggttttgtttttgttttattttaattattgatagtgtttagggttttggggtgttttttatagttaataaaggtgatattttagggtaggggttttgatgtgagtggggtgttgggggggaatagaggggatttagttgtgttattgggtttttttgatttggatgttttgagtatgaaatgggttatttagagtgttattttttattgtgattgatatgaatttgtttatgaatattttttttatagtgtgagatagtttttttgtgtgggattgagaagtaagatattaatgtagtagaattgtatttgtgttttatgaatatatataaattttaaaaataaagaataaaaatatatttttttatagatataggtagatatgtttttatagtatgtatgtaaatgtgtgtgtgtgtgtgtgtgtgtgaagagaaagagtgaatagagagattaagatttttttaatggtgaaaagatatatatatatttggaattagttagtttgatttagtttaggtgattttaattttggtggtaataattaaagtattgtagttaggagttagttgaatatatgtttttttttttttattagattgaattagagtgttgattttggttatattaatgttataaatttttttatagtttgtttgatttggtgtttgttggttttaatatttatagtgaatataagtaggttgttgttttttattttttttatagtttatttagtggttagtggaaatttgatgataatatggtggttaagttt

SEQ ID NO: 280 - DNA, 4316 bp, Artificial Sequence
  chemically treated genomic DNA (Homo sapiens)
aagtttgattattatgttattattaagtttttgttgattattgagtaggttgtgaagaagatagaaaataatagtttatttgtgtttattgtggatgttaaagttaataagtattagattaaataggttgtgaagaagtttgtgatattgatgtggttaaagttaatattttgatttagtttgatggagagaggaaggtatatgtttgattggtttttgattatgatgttttggttgttgttattaaaattgggattatttaaattgagttaagttggttaattttaaatatatgtatatttttttattattaaaagaattttaatttttttatttattttttttttttatatatatatatatatatatatatttatgtgtatgttataaaaatatatttatttgtatttataaaaagatatatttttattttttatttttaaaatttatgtatgtttgtgaggtataagtgtaattttgttatattgatattttgttttttagttttatataaggaagttgttttatattatagagaaaatatttatgaataaatttgtattagttatagtgagaggtaatattttaaatagtttattttatgtttaagatatttaagttaaagaaatttaatagtatagttgagttttttttgtttttttttaatattttatttatattagggtttttgttttggagtgttatttttattagttgtgagagatattttagagttttgggtattgttagtgattggggtagaataaaaataggatttggttagagtttatagatgtggttagaggaattgtggggtgggtgagtttttttataggtttttgattataatattttaataattttagggattagttttttttattttatttgtagtttgagagtagttttttttgtttttatttatgggaagaaaatgttttgtgagaggttagaaaggaggtagggttataaggttttagagtaaatttttagtttttgattttagagaagtttttagaaaagtgtaattgtagatttagggtaggattaagaaatatgaagaaagtagatgtgggttttggattaattgtttttttgaggtttgttattagtagggatttttttttgtgatttgtgattgttgggattaggttttattattattataattattgaagtgaagaatttgttttttatttttataggagttttataaatgagtaggtgttggtatatagggtttaggttgggtagatttatgagtgtggatggtgttttttagtaatgaggtagggtatatttttatttggggtttgtaatttttagtgggataagaaaatttagattttattttttatttttttttatttgagtttttttttttttatattatagtagtgattatagttttagtgattatagttttaaggataataaggttagtaatgatgtttatgatggggatggtgggttggggagattgttttgggaaaggaagggaaggtgaggggttttgatttttaggttttagttttgattttgttgaagagttttagaagggtttttgttttttttgagaaaagatatgattttttgtttttttttttatttatttttttttttattttattttaggatgaggggttggggtagttttttgtgttgtatatggtatgtgtatttttgtttttttttagaaggtattattatagtggtttatttttggaaggttttattttttgtaggtttggtttttataagttttgtgttttgggtttgtttttttttattttgttgttaggttagtgtgatttttgtagggtagaagtttagggtttagtattttagggtggttttatggttagagatggggtggtgggtaatgtgtgtttttggaggatttgagaagagttagaaaatttaggtattttgtattttttatgggaaattttagtagtatttatgtgattaatttgagaatggataggatatttggggtggggaagggagtatagaatttagatattagtttggatatagatatttgggaaaattttttattttttggaaagtttgagtttttgagtggggagtagggatttttggttttgatttaagtggaggttgagggattggaattagagttttaaatatattgagtgtgaggtagagaataaaatttgagagaaaagttatggggtttaaggttgttggagggtttaaaggggattgtggattggtattttagggattgttttttttttatttttttagagattttattttttaattgttttagagagtagggtggatttttatagttattttttggtattggattttgaaagttaggaagattttttttatttaggattagagggagggtgatattttagtattgggtttattttttttttaattttgtgtgaggttattttaagagatttataggagatagggaaggtgtttatggtttttggtatttgtgtgttgtagtgttttttttttattttttaagtatttgtggagtaattttaggtatttgttttttaggtaggttttgaatttttttgtatatttttttgttttatagaagtgttgggtgatttgagttatggtgtttgttgtggtttaggagtgtaggtttttgtttagggagatgtaatttttgttgttgtatgtgtgttggtgatatttgtggaggaggtgtttgttgggttttatgttgtagttatttattttttggagggtgtgagattttagttggtttttgtagttagttttgtttagttagttttgttttttttttgtttaatttgtggggattttggtttaaattgaaaatgaattttggtaaaggtgtttgggatttttttgggtggagggtttgggtgggtttgttgttttggggtagattttggatttggagatttggggggatttgggtggtttgtggtggatggggggtggttgtgatttgtgtttttggttgggtttatttattagttttgttttggttgtagtggtggagtaggttttttagggttatttggttagtttgtgtgttggttttggtgtattttgtggtttatttttaatattgtggttttttttgttttatttatggtttttgtggttttatttttggaattgtggtgttgttgttgaattgtaggaattgtgtgttgtttatgtattttatggtgatgtagtggggttttttgtggttgggttgtgatatagtggtgttgaaatattttaaggagtgggagtttgggggtgaggagggggtgagatttgttagatttttttttgggtgtggttttttgagttttgtgtttttattgggtgggttttttatttttttttatagaggttgtttttttttggattttgtatttatttgtttaagtattggttagggttagggtttttgagagtagtaggaggaggttttggggtgttatgattttaatttttgtgtttgggaaaaatatgagttttgtggggtgtgtgggattttagaatttgggaattgtggtgatattgattggtttttttagaaatgtgatgtttaatgggagtgagaaatggggttgtgttatgagtatttaggatgaaggatttgatatgggttgggagagaaagagaaattttggggagatggggaatttttaatattgagttttttaattttagatattgttttggggtttgagtttttgagagttatttttggggttttgggattttgtttttttttttttttttttttttttgtgtagggtgtgttttaatgtttttttgagtttttgtttgggggttgagaaattagggagaaatttttggtatggatttagtttatttttttttattatttattttgaaattttagttttttgattgaattttttgttttttattttatatttggattttttggatttttttggaagaaaatttattttaaggagtttggtgttagataatgaatttgttttgagaatgaaggtttagagatagttttttttttttttttttttttttttttttttttttttttttttttttttttttttttttttttttttttttttttttttttttttttttttttttttttttttttttttttttttttttttttttttttttttttttttttttttttttttttttttttttttttttttttttttttttttttgtttttttttgttttttttttttttttttttggaaaagttgtatttgagtatatgaaataggatagagattagtttttttttttttttttttttttttattagttgtag

SEQ ID NO: 281 - DNA, 14147 bp, Artificial Sequence
  chemically treated genomic DNA (Homo sapiens)
gggggtattgagtaatatatttagattaataatattttataagtgtgagtattattgatttaaatttttttgttggttgtgttttgtgtttatgtttgttttatatttattttttttagagttgttttttttagagttttagtaatttttatttttttaaatttttttagttatgggaaggattagtaggtgttagtggatttaaaagaattttagatttgttgagatttttgatttttggtgtttagattaattagtaaatagtttaattaaatggtttgtttttatggttaatataattttgaattggtggttatttagattaagtttattttgtttttgagatggaattttgtttttgttgtttaggttggagtgtagtggtgtgattttggtttattgtaatttttgttttttgggtttaagggatttttttgttttagttttttaagtagttgggattataggtatttattattatttttgattaatttttgtatttttagtagagatagggttttgttatgttggttaggttggttttaaattttgattttagatgatttgtttattttagtttttttaagtgttgggattgtaggtgtgagttattgtgtttagttaaagtttagtttgtataagaaggttttttttgttatgttataggatttttgagtttattaaatagattttaatgttttgagattttatgtatttttttaaaatgaagtatttaaattgttagtgtttgtttttttgtttggtttttttgatgtattgatttggtttgttagtgtgatgaaaaatatggttgagttttattgttttattgtaattagtaggattgtttagaagtttaatttttttaagagatgaagatttgagtttatgtagttggttgttttttaaaaatatttggttatttgggatatattttgaattaattttttggttattttatgtgattaaaagtgttagttttttttgtttttagtatatttttttgtttgggaagtggaagggatgaaatttttatatttttttttgatgatatagaaaggagtatatatttatattttatgaatagatatgtaattatagaagaaatagtttaatggttgggtgtggtggtttatatttgtaattttagtattttgggaggttgaggtgggtggattatgaggttaggagtttaagattagtttgtttaagatagtgaaattttgtttttattaaaaatataaaaaattagttgggaatggtggtaggtgtttgtaattttagttatttaggaggttgaggtaggagaattgtttgaatttggagggtggaggttgtagtgagttgagattatgttattgtattttagtttgggtgatatagtgagattttattttaaaaaaaaaaaaaaaagtataattatatgattatttatattgttttatatattaaattagtagtaatttgttttttatatagtaaataaaaataaattagtagtaataaatatattttttttgtgttatagttagtatttggtgaattttgtattttttttttttttaaagtgttgaatttataggtttttataaggtaagtttatattattaattaattttgtttttttttttgatgttaaaattgttttttaggagttgattaggtttatttttttgttttttaagtattatttttagaatatttttgaaagtatttttgttttttggtaataatatttatattttatttattttttgtttttaaatatatatttagttaattttaggttttttttaatggagtagttatttatttatttaatatatgttgggtgttttttttgtgttatatattgttttggtttttggggatagagtaggaaataaaaaaaaataaaatttgtttttatatagttgatattttagttaggggagataaataataaataaatgaatgatgtagtatgttagatgttgatagtgttatggagaaagtatattatggagattagaagtattatttgtaatggaatagttatgattttaagaagaatggttgattggatgtgaagtgtgagagagaggagtttaggtttttggttgagtaattggagggatggagttgttattatttgagatggagaagttaggggaggagtagatttggaggggaaggttaggaatttagtttggaatttgttaagtatgaggtatttattaaatattgaagtggatttttagaagatgttattaaaattagttaagtttaggagagagttttgggttagaaataaaaatgtgggagatattggtatatatatgggtttatattatttttttttttaatttaatattttattttattgttttttgtttttttaatagtatttagttttatttattttttaaattgatttttatattgatagtataataaaatttatattttttattatattaagattttgtgtgatttaatttttttttattttttggattttgttttaggttattttttttttttatttaatttttaatattttgattttattgttttttaaatagttttttgttgttttttgttttttttgtggaaaaggtttttttattgtttaattattaggtattttttgatttttttttattttttatttttgagaaaggttttttttgattttttatattaattaggatttttttgggtgagatttgatttaaattggtttagagaaaaggagttaattgattggtttatgtaatttaattttttttttttgttgtaatttttttttggtttttattttatttaaggttaaagttagggtttttattatggttttgtaggttttatatagtttgttttttttattatttttttgattttattttttatattttttttttatttatttttttttagttagagtggtttttttgttgtattttaaatatgttaggtatatttttattttagtgtttttgtgtttgttgttttttgtgtgtggaatatattttttatatagttatattatttaaaatttattgtttttaagtttttatttaaatgtttttttgtgaagttatttttgagttttttttaaaattgtagttttttatttttgtattttttattgttttttatttttaatttttgttattgtagttagaattatttgatatatagtttttattttattggttttttgttatgtttttttttataagaatttgaagtttattaggttgggagttttgtttgttgtgtttgttgttattttttagtgtttaaaattgtttggtatatagtaggtatttaataatttttgaattagtgaaaattagatggtggtttggtatttttatataggaatgagttaggtggaaattatttaggatataagtagattttgaagtgataaggaagggttattataattatgtggggtttattttgtttttttttgttttttttttttaggtttagtaatagttttattaaggattttatgaatattaaagtttatatttatatgttgttagaggtgagagtagtttattttattattagattttgtgtttagggtggtgatttgaagaaggaagagagtgaaagaagggaaggattatttttttttttaaattggagttaagggagggaggttagagtaagtttgggggtgtaatttagatttagtttttgtttaattttttttgtttttttttttaggggtttagagaattataaggtttgtagaattttttagagaagttttattattgattttttttttttatttttagatattaaagagtttgaatgtttttgagttatatggtttttttttttttttataaattttgttagttgttatgggggtttgtttttagggtataaagttattgagagatttagagatttagtttttttgtggaatttttaaaatgttttagtagttttgtttttagtttgttgtttggtagtatttgttagttgattttatgtattgtttttttttttgttattttggtaatttgggttttttattttatttttttttttatttttttttttagatgttattttttgaattgttatagagaatgggttaatttatggtggaggtttgtttatttttataataattaaagggttttaaggtttatgtttttatatatttaattattttttaggtattttaaattatatttaaattttaatttagttttattttgttttagtttttgtttgtaagtgttttagtttttaatgggtatagatttggattttgttttttttagttgggtttttattttaggttgagtttagttattgttaattaatgtagagttaggttttttttttttttaattttggttgtagtttaattttgttttttgaaagtattttgtttttgttatttaatgtttttttgtgtgtttgatagttattttgtttttttatttttgttgtgttttaaatttgtttttatttagttttatggttttgtttaattgtagagttgttttgtttgtttatgtggagtttagtttgatttatttttgttggttgttatgtttatttttatataagttttgtttttgttgagtagtatggtgtgtgatattgtttttttggtgttttggtaggggtttagaagttttttgtttgttaattagagaaaaatagggttatttatttttgtttttgggggttgttttttattaattttatgtaagttaattagtgtgaggtagatttttgtttttttgatataggttttgagtttttttagttgtttatagtttgttagtttttgagttaattggtgtggagtattgtgaaggttgaatgtgtttttttgggattttaggggttgtgagtgttttattatttttttttatgttaattatggtatagttttgtagggaagggtttgttttttaattttttgaggttttgtggttgattaatagtgttttggttaattagtgagtggtgggatattgggttttttttttttgggtttatgtgagttgtagggaaatgtaggggtggtttttaggtgttgttgttgttattgttattattatttttattgttgttttggaatttaggtttggggggtggtggggttgtgtatggagtttttgttttttggagttgttaatattgttaatgttattgttatgttatatataggtgagttttgggtttggagggtggagggtttagtttgtgattttatgtattttttttgtttttgtgtagaggatgtggtttggttggtggtttgttggtgtttgattttttgttgttattattatggttggtggatttgtgtgtggtattgtttaagttttttgttttttatagtggatttgattgtggtttaattttttttttttgttgtataatggattggtttgtgtgtttatgtttttttttatgttaatttagggtggatttgtttataggttttttttttatttttatttttatttgttttttatttatttttatttatagggagttagtttgtgatagtgtttagtttttttaatagtaggtgtatttgagtgtttggattttttttagttttaatttttaggagatttgtttgtggttttatttattttattttttttgtatattgtagtgaattaatttgtggtgttgtatttttttgtatttttttttaatagtgagtttatttgagtttgtatttttgttttttttagttttttaatgtattagtttatggttttttttaaaattattttttttttttattattattattattattttatagtggattagtttttatgtttggatttatgtttttttagttattagtttattgttttgtttttttttttttgtagattgttgttttagtgtttggggtttttttttttttaatagtgggttagtttagtgttttatatttttttatttttagtagtttagtttatagttttttttttttttgttttgaattagtttgtgtgatggtttttttttttttttattgtggtgtaggagtttgtaaggttttttgttttttttttttttagatgatgagttttattatttttttttttgtagtggatttgtttattggttttttttttttatatttttgtatgtttgtatagttttttgtatatttttttgtgagtttagtgttttgtaattgggggaagattggttgtgtatttttaatttttttttttttttttttttttttttagaagagaatgtgttgatttttttttttttgtgatggagtattgtatggttttttttgttttttattttttaatagtgggttagtttggttatatttgtaattataaagatgttttgttttattataataagtgaatatattagtgttagtgatgatagtaatgttaataggagttagtgtttattgagtatttgttgtatattaggtagagtgttttatatgaatgagtttttttaatttttattataattttatgagataggtagtgagggaattgggttatagggaggttaaattttttatttaaaggtggtttaggaagtatttaggatataggataatttttgaggttttttttttagattttattttattttatgtgaggttttagtttttaaaaattaaattagtttttatttttaagtttttgtttttgttgttttttttgtttgtagagtagtttttattttttatttttttttagtatttatttattttttaattttagtagttgtgtgattttagatgagtgatttaattattttttttttgtgtttttttttttatttgtgaaatgggggattagaattagaattttttttagtgtaaataaatattaattgtgaattaatggtaaaataagtaatttttttagtattattgtttatatttttttatttttttattgtgttttaattatattggttttattatatagttttttaaatatagtaggtatgggttagttttagggtttttgtattggttgttttttgtgttttgaatattatttttagatttttgtatggttttttttagtattttgtttaaatattaatttttaaaggatgtttattatattgtggtgtgtggaatgtagtataaaaagatatatgtatgaaagatgtttttaagaatgttagtttatatatgagtaagggttttttttttttttaaaaggatgtgtttataagattgaggtatgtaatatgttttgtaaaggtataggtataaaagttgtttttaagagtgttagttgtatatgtgaataaggattgtgttgttgtattgaaagaatgtgtttataaaattgtggtgtgtagttgggtataggggtgtgtatttatagttttagttatttgggaggttgaggtgggaggatagtttgagtttaggagttttaggttagtttgggtaatatagtgagatttttttttttgaaaaaaaaaaatttaaaaaataattattgtggtgtgtgtaatatatttttttaaaggtataggtgtaaaagatgtttttaagagtgatttgattttgttgtatttgggtagtgttattttattaaaggttgattgttatattatggtatttagaatatattatataaaggtatatgtataaaaaagaagtttttaataatgttatttgtaaaaataaaaaaagttaatttttttttgattatttgaagttgtatatttagtagggtttaagttaggtttttgatttgttttgttgttttttattattgtttgatatattgtgtgggttatttgtttgttgtttgtttttttttattagaatgtgagttttatgaggatttagtttttgtttgtttatttattgttatgtttttagtaattgaaaatgtattaggtaaatagtagatgtttaataagaatttattttatgaataaatgggaaaaagataatttgagatattagtgtaggggttatatgaggaagaagaagggatatgagagttaattagttgggattgtttttgtaattaatttttattgagttttttgtgagtattaggtatttttttaggtgttggaatatggtaaggaatgaaatagggtgaaatatttgtgtttgtggagttgatatttattaaaagttggggaggttgggtatggtggttaatattagtaattttagtattttgggaggttgaggtgggtggattgtttgagtttaggagtttaagattagtttgggtattatggtgaaattttatttttattaaaatataaaaaaattagttgggtgtggtggtgtgtgtttgtaattttagttatttgggaggttgaggtaggagaattgtttgaatttaggaggtggaggttgtagtgagttaagattgtattatgtattttagtatgggtgatagagtgagattttgttttaaaaaaaaaaaaaaaaaaatttaagttggggagatagattatgtgaataaaataaataagtaaaattagtataatagataaatgttgagaagaaataatgaaatagggtaggtaggaattgagtattgggggtggttgaaattttaggtatagggaaggtgatttttgaattagggttttatggtagagatggagagagttttaatgtttatgggaagagtatattaggtagaaggaagtgttagtttagaggttttgaggtgggatggtgtttgttatgtttaaggaatattaaggtggttagtgtggttggagtagagtgtggggaagggtagaaggtgaggttatataggtgatgggagttagatagtgtaggtgatatataggataggattgtaggggtagggggagaaggatgatatattagttaatagttaatatttgtggagtatttgttatatattagaggtatttttttgtttaaatattaatttttaaaggatgtttattatatggtggtgtttggaatgtattataaaaagatatatgtgttaaagatatttttaagaatgttagtttatatatgaataaggattttttttttttttaaaaggatatgtttataaaattgaggtatgtaatatgttttatggaggtataggtataaaagttgtttttaagagtgttagttgtatatgtgaataaggattgtgttgttgtattgaaagaatgtgtttataaaattgtggtgtatagttgggtatagaggttgaggtgggaggattatttgagtttaggagttttaggttagtttgtgtaatatagtgagatttttgtttttgaaaaaaaatttaaaaaataattattgtggtgtgtataatatatttttttaaaggtataggtataaaagatgtttttaagagtgatttgattttttggtatttgggtagtgttattttagtaaatatttattgttaaatattatggtgtttggaatatattatataaaggtatatgtataaaaaagaagtttttaataatgttatttgtaaaaataaaaaaaaaagttaattttttaagttttttatagaagtattttatagaattgatatagttaatttttatagaagttttggagggtaggtgtatttttgagaatatttgattttgagagtaaaatatttttattttatagatgaggaaataagtaaagagaggttgagtaatttgtttagggtaattttgagttagaatagttagaataggggtagaggaatataaggttgaagatttagaaagaagaatagatttgtaagggtaggtaggttatttggtatttttgattatgtagaggaagaatgaattttttttggaatgtgatgattgtgtaattgagtttatgaagtgagggaagagttttttttgtggggagagtagtttgtgtttatttttagaggttggaattgttttgggaatggtagatagtttagggtggttgttttagagtttttgtatatgttgtttgttttgtttgaaggtttttttttatagagggtagtttggtttgttatttttttttttttaggttaggtgttatttttttggggaagaattttttgtatattttgtgtaaaaatagtatttttgttattttttaggattttatttttttttgtttttttttatggagaattggtggtgtaaggtgattgtttattagagttaaattatttaggttttgaattttggttttgttaatttttagttgtgtgatttggggtaggttatttttttgtatttttattgttttatgtggaaaatgggggaaatgataatttttattttttaatggtggtttgaggatttaatgagttaaatgatttaaagagtgtgtagtttatggtaaggattgtatgtttggtttgtatttttaaattattaaaatgtatttatagtatatttgtagatgtttgataggtttttgaaattgattatttttaaaattggtgtgattttttttaaaatttatttttttgtaaggtttttattttagttgattataatgttgtttttgtgggtgattaggttataaatttagatttattttggattttttttttattttttttgggtatgttatttgttagtaagttttattttgtgtttaggttttttttagattttagttattttttgttagttttattgttattattattatttattgtagtggtttttttagttttaatagtttgttttttttataattgttagggggattttgttgaaattttagttatagtttgttatttttttgtttataatttttttgtggtttttgttttatttaatattttgatagtatttgaaaaagtttggtttagtttggtttttgttattttgttttttttttttgttgtttttttttttttttttgaatttatgttagttttttttttttatgttatttgttaggtattttttagttttgggttttttatattggttgttgtttttatttggtttgttgtttttagatatttatgagtttagtttttttatttttttttggtttttgtttagttgttttttttttggtgattatttttttttgattttttatgtaaaagtaatagtttttttttgtttgattttttttttataatttttattattatttgatgtatttttgtatatgtttgtttttttttttatttgttttttttgttaagatgtgagtttttttggagtagggattgttgtttgttgtgtttttgattgtatttgtagtatttggtttatagtatgtatttattaaatgtttgttaagtgaaggagatggaaagaagtaaatatatttaagtaaggtagattattagaatttttatgaggggttaagtgggagaaataataaaatataaagttttgtgtgttgttgaagttggaagtttattgttattttttatttagttgataggttttgttgtagttgaaagaagaattggtaaaattgtttgtttttgttattaggagttattttgaattttttggatttttgaaataagtttgtttgtaaaataaatttagtgaggtttttggtgataggattttttaattggatattttatggttttgtgatttgtataattgaataggaagtttatgtttatttttagtttgtttttaggaaagaaagtagtaatggggtgatagggaggattttgttttttgaaggatatgttgagagggaatagttggtgtgaggggttgtttagtttaatggtgaaatgtttagttaattggaatttgattgtttggttttaaatgttggttttgttatatgtggtttgtggaaggtatgtagatatttgtgtttttgttgttttatttataagttaatgataggaagattatttattttttagaggtatgattagggataaataagttaatgtttattaaaaaaaaaaataatagtataggtgtatatgtttttatttaaaatttttggggttagatgtgttttagaatttttatttttttatattttagaaaggtaatatgatgtatatatgatgttatataatattttttagtaagttttgtaattggttgtgtttatatttttgtagtaaaatgtatgaatatttgtaataagtgagatttaataaagattagaaagggttttgttttattttaaattaggttttgttattaaaagagttaaaagaagttttttgtttttagagtattttggatgttggaatggtagataagggattatgaataaattagaaattaatatttagagtttattatatattttaggtatataatatttaatttgtataatatttttgtgaattaggtattgttatttttattttattaatgggtatattattatttttgttttatatatgagaaaattgaggtataaagaggttaaagaatattagttaagtgtggtgttttatgtttgtaattttagtattttaggaggttagggagagaggattgtttgagtttaggagtttaagaatagtttgggtaatatagtgagattttattttttaaaaaaagaaaaagaatatgtttagggttatatagttaataagtggtagaattaggatttaaatattggtaatttggttttagtgtttgggtagttgtttagtaggttatattgtttttttgtttagaagagtgtttgatgtgtattaagtttttaatagatgttaattattgttgttattaagaaagagaatatttagggttgagtatggtattttatatttgtaattttagtattttgggaagttaaggtgggaggtgggtggattatttgaggttaggagtttaagattagtttggttaatatggtgaaattatgtttttattaaaaatataaaaattagttgggtgtggttgtgggtatttgtaattttagttatgtgggaggttgaggtatgagaattgtttgaatttgggaggtagaggttgtagtgagttaagattgtgttattatattgtgttttagtttgggtaatagagagagattttattttaaaaaaaaagaaaaaaaaaaaaagaatgagaatatttagggatagtaataggatagagagattaggtatttatttagttttaggatggttttataaaggaaaggatttttgggttgggatttgaaagataagaaagattgttaggtgaaagaaggaagttttatgtggagtgagtagtttttgtaagggtttggtaaaaaaaaaattttttgaaaaatttgatattgatatggtagaagatatagataatatttaaatgaggaggatggaattagttttttatttttgttgtaataaataattataaatttagttgtttaaaataatatatttgttattttatagttttgtaggttagaagttttatattggttttagttgaaattaaggtattggtagggttgtgttttttttggaggttttaggggaaaatttattttttgtttatttaagttgttggtagaatttaattttttgagattgtaggattgaagtttttgtttttttattgtttgttagttgatagttatttttagttttaagaggttgtttatagtttttgattttgagttttttttttttatttttaaagttaataatggtaggttgagttttttttatattttgaattttttttgttttttttgttattatatttttgagttatttttttttttttattatttgttttttagagtttatatgattagattgaattttattaaataatttagaaataatttttttgttttagggtttgtaattttaattttatttgtaaagtttttttttgttatgtagtgtaaataatatataggttttgaggattaggatgtggagtagggttggtattatttggtttattatagtttgttttttgatttttatagatttatatttgttttatatttaaaatatatttatattattttaagatatttatgagttgtattttattatagggagtattttaagtaagattggggagttagaagttagtttgggaaggtttagggaatgatggtagggtttgaagatagagatggagaaaagatgataaaaaaaggaattttttttttgttgatttttgttttttttatgtttatagttttttaatttagttgtttgttttttagg

SEQ ID NO: 282 - DNA, 14147 bp, Artificial Sequence
  chemically treated genomic DNA (Homo sapiens)
tttggagagtaaatagttgagttgagaggttgtggatataggaggggtagaggttagtgggaggaggatttttttttttgttattttttttttatttttgtttttaaattttattattattttttaaatttttttagattaatttttagttttttagttttgtttgggatgttttttgtgatgggatataatttatgggtattttaggatggtgtgaatgtattttgaatgtgaaataaatgtgaatttgtgggggttagagggtagattgtggtaggttaaatgatgttaattttgttttgtattttaatttttggaatttgtatgttatttatattatatagtagaaaggaattttgtagatgaaattaaggttataaattttaagatagggagattatttttggattatttgatgaaatttaatttaattatatgagttttgaaaagtagatgatggagaaagaaaggtagtttagagatgtgatgatagaagaggtaggggagatttaaaatgtgagagggatttaatttgttattgttggttttgaagatggaggaaggaggtttagaattaaggattgtgggtagttttttaaagttgggaatggttgttagttgatagatagtaaggaaatagggattttagttttataattttaaggaattggattttgttaataatttgaatgagtaggaaatggatttttttttagagtttttagaaggaatgtaattttgttaatattttgattttagttgagattagtgtgggatttttgatttatagaattgtaagataataaatgtgttgttttaagtagttaaatttgtgattatttgttatagtaagaatagaaaattagttttattttttttatttgaatattatttgtattttttattatattaatgttaagttttttaggaggttttttttttgttagatttttgtaaaggttgtttattttatgtggggttttttttttttgtttagtagttttttttattttttaagttttagtttaaaggtttttttttttatgaagttgttttaaaattgaatgaatgtttgatttttttgttttgttattgtttttgaatgtttttgttttttttttttttttttttttttttgagatggagtttttttttgttgtttaggttggagtgtagtatagtggtataattttgatttattgtaatttttgttttttaggtttaagtgatttttatgttttagttttttgtatagttgggattataggtatttatgattatgtttggttaatttttgtatttttagtagagatatggttttattatgttggttagattggttttgaatttttgattttaagtgatttatttattttttattttggttttttaaagtgttaggattataggtgtgagatattgtgtttggttttgaatatttttttttttgatgatagtaataattaatatttattgagagtttaatatatattaggtatttttttaagtagagaggtaatatggtttgttggataattgtttaggtattagggttagattgttagtgtttgaattttggttttgttatttattagttgtgtgattttgggtatattttttttttttttttaagaaatggggttttattatgttgtttaggttgtttttgaatttttgggtttaagtaattttttttttttggttttttaaagtgttaggattataggtatgaggtattatgtttggttgatattttttaatttttttgtattttaatttttttatgtgtaaaatagggataatgatatgtttattagtaaaatggggataataatatttagtttatagagatattgtatagattaaatattatatgtttgaggtgtatgataagttttaaatattagtttttgatttgtttatagttttttatttgttattttaatatttaaaatgttttaagggtagaaagttttttttaatttttttggtggtaaaatttgatttgaaatgaaataaggttttttttggtttttattgaattttatttattgtgagtgtttatatattttgttgtagaaatatgaatatagttgattatagagtttattaaggggtgttatgtaatattgtatatgtattatgttatttttttgaaatgtgaagaaatggaaattttgaaatatatttggttttaggggttttgggtaagggtatgtatatttgtattgttatttttttttttaatgggtattgatttatttatttttgattatgtttttgagaagtaggtagtttttttgttattaatttataaatgaggtagtggaggtataaatgtttatgtattttttataggttatatgtggtaaagttagtatttggagttaggtagttaggttttagttgattaagtattttattattaggttaaatggttttttatattgattatttttttttagtatgttttttaaagaataggattttttttgttattttattattgtttttttttttgagagtaaattggaaataaatatgagttttttgtttaattatataagttataaagttatgaagtgtttgattagagagttttgttattagagattttattgaatttgttttgtaggtaggtttgttttagaagtttaaagagtttagagtgatttttggtggtaaagataggtaattttattagttttttttttagttgtaatagaatttattagttgagtgaaaggtgatggtgggtttttagttttaatagtatatagggttttgtattttgttattttttttatttgattttttataagagttttagtaatttgttttgtttagatatgtttatttttttttattttttttatttagtaagtatttggtgagtgtatattgtgggttaggtgttgtggatatagttgagaatgtaatagataataatttttgttttagaggagtttatattttagtaggaaaggtagatgagaaaaaaggtaaatatgtataagagtgtgttagatggtggtaagggttatgggaaaaaaattaagtaggggagagttgttatttttatatggagagttaggggagagtagttgttaaggaggggataattgggtagagattaaaaggaggtgaaggaattgagtttgtgagtatttgagagtagtaagttaggtggaagtggtagttggtgtgaagggtttaaggttggagagtgtttggtaggtgatatggggagaggaggttgatatgggtttgggggagaggagggaggtagtgggagaggagaatagagtgatgggggttagattgagttaggtttttttgggtgttgttaggatgttgagtgagataggagttataagagggttgtgaatagagggatgataggttgtgattgagattttaataggatttttttggtggttgtgagaagaatagattgttggggttgaagaagttattgtggtagatgatggtggtagtagtggggttggtgagaagtagttggggtttggagaaagtttgaatatagaataggatttgttgatagatagtatgtttgggggaggtgagagaagggtttagggtgagtttaggtttgtggtttaattatttataaagatagtattgtggttagttgaggtgggagttttgtaggagagtaagttttgaggggggttatattagttttggagatggttagttttagaggtttgttagatatttatgggtatgttatgaatatattttaataatttaaaaatgtaagttaggtatatgatttttattgtgggttgtatattttttgaattatttaatttattgaatttttaaattattgttaaagggtggggattattattttttttattttttatatgaggtaatggaggtatagagaagtaatttgttttaagttatatagttggaagttggtagagttggaatttaaaatttaagtggtttggttttagtgagtaattgttttatattattagttttttatgaagagaaatagagaagggtaagattttagagagtgataggaatgttgtttttatatagggtgtataaggagtttttttttaaggaagtgatatttggtttgaaggaggggaggtagtaagttaggttgttttttgtgggggagggtttttaggtggagtgaatggtgtgtataaaggttttgaggtagttattttgaattatttattgtttttgagatagttttaatttttgagggtaagtatgggttgttttttttgtagggagagttttttttttattttatggatttaattatataattattgtattttaggaagaatttattttttttttgtgtgattaaaggtgttaaataatttgtttgtttttgtaaatttgtttttttttttgagtttttagttttatgtttttttgtttttgttttggttattttggtttaaggttattttgagtaagttatttagtttttttttgtttgtttttttatttgtaaaatggggatattttatttttaaagttaaatatttttaaaagtatatttattttttaaggtttttgtgaggattaattgtgttaattttgtaaaatatttttgtaaaagatttgaggggttgatttttttttttgtttttataagtagtattgttaggaattttttttttatatatgtgtttttgtatagtatattttaagtattatagtgtttaataatgaatatttattgaaataatattatttaggtgttagaaaattaaattatttttagaaatattttttatgtttgtgtttttaggagagtgtattatgtatattatagtggttattttttgggtttttttttggagatggggattttattatgttgtataggttggtttggaatttttgggtttaagtgatttttttattttagtttttgtgtttagttatatattatagttttgtgaatatatttttttaatgtaataatatagtttttatttatatatataattagtatttttagaaatagtttttatatttgtgtttttatagagtatattatatattttagttttgtgaatatatttttttgaaaaggaggaaaatttttatttatatataaattggtatttttagaaatatttttgatatatgtatttttttgtagtgtattttaggtattattgtgtggtaaatattttttgggggttggtatttgaatagaaaagtgtttttgatgtgtggtagatattttatagatattagttattagttagtgtgttatttttttttttttgtttttgtaattttattttatgtattatttgtattatttggtttttattatttgtgtgattttattttttatttttttttgtattttgttttagttatattggttgttttgatgttttttgaatatggtaggtattattttattttagggtttttgaattggtatttttttttgtttggtatgttttttttgtagatattaaggttttttttgtttttattgtgaggttttaatttaagagttattttttttatgtttaagattttaattatttttaatatttgatttttatttgttttattttattatttttttttagtatttgtttattatgttaattttatttatttattttgtttatatagtttgtttttttagtttgggtttttttttttttttttttgagatagagttttgttttgttatttatgttggagtgtatggtgtaattttggtttattgtaatttttgttttttgggtttaagtaatttttttgttttagttttttaagtaattgggattataggtgtatgttgttatatttagttaatttttttgtattttagtagagatggggttttattgtgatgtttaggttggttttgaatttttgagtttaggtaatttatttattttagttttttaaagtgttaggattattggtgttagttattgtgtttagtttttttaatttttaataaatgttagttttataagtataaatattttgttttgttttgttttttgttatattttagtatttagaagagtgtttggtatttataaggggtttagtaaaggttggttgtaggaatagttttaattaattagtttttatattttttttttttttttatgtgatttttatattggtgttttaaattattttttttttatttatttatgggataaatttttattgagtatttgttgtttatttggtatatttttagttgttggagatatagtggtgaatgagtagataaaaattgagtttttatgggatttatattttaatgaggagagatagataataaataagtaatttatatagtgtgttagatagtgataaagggtaatgggataaattagggatttggtttgagttttgttgggtgtgtagttttagatggttagggaggggttgattttttttgtttttataagtagtattgttaggaattttttttttatatatgtgtttttgtatagtatattttaagtattatggtgtgataattaatttttaatgaaataatattatttaggtataataaaattaaattatttttagaaatattttttatgtttgtgtttttaagagagtgtattatatatattatagtggttgttttttgggttttttttttttagaaaaagggattttgttatattgtttaggttggtttggaatttttgggtttaagttatttttttattttagttttttgagtagttgggattataagtgtatatttttgtgtttagttatatattatagttttgtgaatatatttttttaatgtaataatatagtttttatttatatatataattagtatttttagaaatagtttttatatttatgtttttatagagtatattatgtattttagttttgtgaatatatttttttgaaaaggaggaaaatttttatttatatataaattggtatttttagaaatattttttatatatgtatttttttatattgtattttatatattatagtgtggtaaatattttttgggggttggtatttgaatagagtgttgaaaggaattatgtagagatttgggggtggtgtttaaggtataaagaatagttaatgtaaaggttttgaggttggtttatgtttgttatgtttgaggagttgtgtggtggaattagtgtggttggagtatagtaagggggtgggaaggtataggtggtaatgttagaaaggttatttgttttattattaatttatagttaatatttatttatattggaagggattttagttttgattttttattttataaatgaagaaaaaggtatagagaggaagtggttaaattatttatttaaggttatatagttgttgggattggggggtgggtgggtgttgagagaaggtgaggaatgaagattgttttgtaggtagagggaatagtaagaataaaagtttggaggtgagaattaatttggtttttaaggattgaggttttatgtggggtgggatgagatttaagaggggagttttaaaaattattttgtgttttgagtattttttgggttatttttgagtaaggaatttaatttttttatggtttaatttttttattatttattttatggggttgtggtgaggattaaaggaatttatttatatgaaatattttgtttgatatatggtaggtgtttaataaatgttagtttttattggtattattattattattggtgttaatgtatttatttattgtagtgaggtagaatgtttttgtggttatgagtgtgattaggttgatttattattaagaggtggaggatagggaaggttgtatagtgttttattataaggaaaagaggattagtatgtttttttttgggaagggaaaaaaaaagagaaggaaattgaaagtatatggttgatttttttttaattataaagtattggatttatgggagggtatgtgggggattgtgtaagtatataggggtgtgggggaggaaggttaatgaatagatttattgtaaagggaggggtgatgaggtttattgtttgaggggaaggggagtagaaaattttatagatttttgtattatagtgagaggagagaaaagttattatatagattgatttaaagtagagagggaaaaggttatggattgagttattgaaaatagggagatgtaaagtattaaattaatttattattaaaaaggagagaattttaagtgttagagtgatagtttatgaaaaagaggagatagggtaatggattgatagttaaagggatgtgaatttaaatatgaagattgatttattataaaatggtggtggtggtggtggggggggggggtggttttgaaaaaagttatggattgatgtattgggggattggaggaggtaggaatataaatttaggtagatttattgttaaagagggatgtggaggagtgtggtgttatggattgatttgttatgatgtataggaagggtggaataaataaggttatggatgggttttttgaaagttgaggttaggagaaatttaaatatttagatatatttattattaagggggttgaatattgttataggttagttttttataagtgggggtgggtggggggtgggtgggggtaggggtagggggaaagtttatggatgagtttattttaagttggtgtggggaaaaatataagtatgtagattgatttattatataatgggagggggaggttaggttatggttagatttattataagggatgaagggtttgagtaatgttatatgtaggtttattagttgtggtggtggtggtggggagttgaatattagtaggttattggttaagttatattttttgtgtgggggtgggaaggatatgtggggttatggattgggttttttattttttaggtttagagtttatttgtgtgtagtgtggtggtggtgttggtaatgttggtagttttggggggtgggggttttatatgtggttttattgttttttaggtttgggttttgaggtggtggtggaggtggtggtggtggtggtggtggtagtatttagaagttgtttttgtgtttttttatagtttatgtgggtttgaggaggaggagtttaatgttttgttgtttgttgattggttaaagtgttattaattggttgtaaggttttgaggggttgggggatgggtttttttttatagagttgtgttgtgattggtgtaaggggaaatgatggaatgtttatggtttttggagttttgaggaggtgtgtttggtttttatggtgttttatgttgattggtttaaggattgatggattgtgagtaattgaaaaggtttggggtttgtgttgggggggtgggggtttgttttatattgattggtttatatgggattgatggaagatagtttttaaggatgggggtgggtggttttgtttttttttgattggtggatgagggatttttagatttttgttaaaatattaagggggtggtgttgtatgttatgttgtttagtggaagtagggtttgtatagaaatgggtgtagtagttggtgggagtgggttggattgggttttgtgtaggtgggtagggtagttttatggttagataagattatagagttgggtaaagatgaatttagaatatagtggaggtaggagggtaggatggttgttaggtatatgaaagagtattgagtggtagaaatgaaatgtttttagagggtagggttgaattgtggttagagttaaaaaggggaggaatttggttttgtattgattggtggtggttggatttaatttagaataggggtttgattagggagagtgggatttaggtttgtgtttattggaagttggaatatttataagtaggggttaagataaggtagggttgagttagggtttgggtgtaatttggggtatttggggaatgattgggtgtgtgaaagtgtaaattttagggttttttgattgttgtgggaatgaataaatttttattatgaattggtttattttttatggtaatttaaagggtggtgtttaggaaaaggaatggaagaaagggtgaggtggggggtttaggttgttaagatgatagaagagagggtagtgtataaggttaattggtaaatattgttaggtaataggttggaggtaggattgttggggtattttggaggttttatagagagattggatttttgggttttttagtaattttgtgttttaggaataggtttttgtggtaattagtagggtttatggggaaaaagaagggttatgtgatttaaaggtatttaggttttttaatgtttgaggatggggggaagaagttaatggtgaggtttttttgggaaattttgtaggttttgtagttttttaagtttttgaaaaagaggatagaagagattgaataaagattgggtttgggttatgtttttaggtttgttttgattttttttttttgattttagtttagagggaaagatggtttttttttttttttgtttttttttttttttaggttattattttaaatatagagtttggtagtggggtgagttgtttttatttttagtaatatgtggatatgggttttgatatttatggagtttttggtgaggttgttgttgagtttagagaaaagaaataagaaagggtaaaatgggttttatatgattatgatgatttttttttattattttaagatttatttatattttggatgatttttatttggtttatttttatgtggaaatgttaagttattatttggtttttattgatttaaagattattaaatgtttattgtatgttaggtaattttaggtattgggagatagtagtaaatataataaataaaatttttggtttgatggattttaaatttttgtaaagaaagatataataaaaaattaatggaataaaagttatgtgttagatggttttaattataataataaaaattaaaaatgagagataataaggagtataggagtggggggttgtaattttaaagagggtttagggatggttttatggagaagtatttgagtaaagatttaaagatagtgaattttgagtagtgtggttatatggaggatgtgttttatatataaggggtagtaaatataaaggtattgaggtgggagtgtgtttggtatgtttgaggtgtagtaaagaggttattttggttggagaagaataagtgaagggggaatgtaagaggtgaggttagagaggtaatgagggagataaattgtgtgaagtttataaggttatggtaaggattttggttttgattttaagtgagatgggagttaagggaaggttgtagtagaggaaggaggttgaattatatgaattagttagttgattttttttttttaagttagtttggattagattttgtttaaaagaattttaattgatataaagggttaaggaaggttttttttaagaatgaagaatgagaaggaattgaagaatgtttaatggttaagtagtaggaaggttttttttataaaaaggataagaggtaataaagagttgtttgagaagtagtgaggttagagtgttagaaattgagtggggagggaaagtggtttaagataaggtttaagagataggaagaggttagattatatagggttttaatataataaggaatgtggattttattgtgttgttaatgtaggagttagtttgaggggtaaatgaaattaaatattgttggaaaagtagagagtaataagataggatgttaaattggaaaaaaaagtagtatgaatttatgtatatattaatattttttatatttttatttttagtttagaatttttttttgaatttgattagttttaatgatattttttaaaaatttattttagtgtttaataagtgttttatatttaataggttttagattaaatttttgatttttttttttaaatttattttttttttaatttttttattttagataatggtaattttatttttttagttgtttagttaaaaatttgggttttttttttttatattttatatttagttagttattttttttaaaattatgattgttttattgtaggtaatgtttttgatttttatgatatgttttttttatagtattgttaatatttgatatattatattatttatttgtttattgtttgttttttttgattagaatgttagttgtatgagggtagattttgtttttttttgttttttgttttatttttagggattagaatagtgtgtggtatagaggaggtatttaatgtatgttgaatgaataagtgattattttattaaaaggaatttgaggttggttgagtgtatgtttagggataggaaataaatgaagtatgggtgttgttgttagagagtaagaatatttttaagaatattttgggggtaatgtttaaagaatagaagaatgaatttgattagtttttaagggataattttaatattaaaaaagagaataaaattagttaatggtgtaagtttattttatgaaaatttatgagtttaatattttaaaagggagaaaaatatagagtttattaaatgttagttgtaatataaaagggatatgtttattattgttgatttatttttatttgttatgtgagaagtaaattattattgatttagtatgtaaggtagtgtgaatagttatatggttatgtttttttttttttttttgagatggagttttattgtgttgtttaggttggagtgtagtggtgtgattttggtttattgtaatttttattttttgagtttaagtgatttttttgttttagttttttaagtagttgggattataggtgtttgttattgtttttggttaattttttgtatttttagtagagatggggttttattattttggataggttggttttgaatttttgattttgtgatttatttattttggttttttaaagtgttgggattataggtgtgagttattgtgtttggttgttaggttgttttttttataattatatgtttatttatgagatgtggatgtgtatttttttttgtgttattaggaaagaatatagagattttattttttttattttttaaataaagaaatatattaagaataggaagaattgatatttttgattatataaaatgattagaaagttagtttaaagtatattttaagtaattaaatatttttaaaggatagttagttatatagatttaaatttttattttttagaaaaattaaatttttagatagttttattaattataataaagtagtaagatttaattatattttttattatattaatagattaggttagtatattaaaaagattaggtaagggggtaggtattgataatttaaatattttattttggggaagtatgtggagttttaaaatattaaaatttatttgataggtttaggaattttgtgatataataaggaaagtttttttatataaattagattttagttgggtgtggtagtttatatttgtaattttagtatttagggaggttgaggtgggtagattatttgaggttggagtttgagattagtttggttaatatggtaaaattttgtttttattaaaaatataaaaattagttgggagtggtggtgggtgtttgtagttttagttatttgggaggttgaggtaggagaattttttaagtttaggaggtagaggttgtagtgagttaagattgtattattgtattttagtttgggtgataagagtaaaattttgttttaaaaataaagtggatttggtttaaatgattattagtttagaattgtgttgattatgaaagtaggttgtttaattaaattatttgttaattggtttgaatattaagaattagaaattttagtaggtttgaggtttttttgggtttattagtatttgttagttttttttatggttggaaaggtttgaaaagataaaaattattgaaattttaagggaggtaattttggaaaaaatgaatgtagaatagatataaatataaaatataattaataaagaagtttaaattaatggtatttatatttgtgagatgttgttaatttaagtgtattgtttagtgttttt

SEQ ID NO: 283 - DNA, 3120 bp, Artificial Sequence
  chemically treated genomic DNA (Homo sapiens)
aattttaagtttaggttgggtatagtggtttatgtatgtaattttagtatttggagggattgaggtgggtggattataaggttaggagattgagattattttggttagtatggtgaaattttgtttttattaaaaatataaaatttagttgggtatgatggtatgtgtttgtagttttagttatttgggaggttgaggtaggagaattgtttgaatttgggaggtggaggttgtagtgagtggagattgtattattgtatttgtttggtgatagagtaagattttattttaaaaaataaataaagaaaatttgaagtatagtatttttttaaattttaaatagataatagaaattggtttttttttatttaaattagaatttaagtttaattttatatatttttgatagtttggattttgttttttaattttataaaattgggaatttaagtattatttggtttgatttaaatgtaatgtagaatttgtattaaaatattatattaaagttttagatttgtagtagttaatagtatttttatgtatgtgttagggattgttttaaatattttatatatattaatttttttattttgtatttttgtttttgttttatatagtaggaaattgaaatattgagaggttaagtaattaaagttatagagttagagtgataggagtaaagttttaatttaggtaatttagatttttagagttttgatttttattattaagttgttagtatagtttttttggtaattatttttaatttaaatataatttgagtgatttatttaataagttattattttgataatttagtgatttgtaatgtaaaattatttattgtaatttatttaatattattgtttttttgtgttgtaaaaattatagtaattgagatgtaatttattatttttttttttatttttggtattttgtgttaatttttttgttttgtggattttttttgattttttattatgtgtgttaattgttattaatttttttgtttgttggggattggggttgtgagggtatatttttgaggggtatggggttagggttaggtaggttgtgtggttgggtggggttttgtgttttattgtggagtgtgggttgggaagtggagagagaagtagttgtgtaatttgttggatgtggattagggtgttttttatttttgttgggagtttgttgattggttgggtgtgggtgtatgtgattgatatgtggttgtattggtgtagtttgttagggtgttattggagatagaatggaggtgttgttggatttggaaatggggtaggtgttggagttattatggttaggtttgttgtggggggaggggggaaggtggtttttttttgtattgttttaaattgatggtttttttttggtatagggtttattgtagtatgttaaatgaggaggtaggggtgttgtttttttgttttttattgtagtattggagatggattttttgtattttggatttagggtttttgatagaagaggaagaagggggaggggtagaagtgttaaggggagtttgttgagaaaagttgtttttgaagttagaaggggtttttgtttttataatgttatttgatagagtggaataatagtatttaaggaaatgggtagaggataataaagaatggagtatatttatggtgaggagtaaaagttttattttattgaaaggtttttttttttttttggtgataaggatatatgtattggtggttaaaagagagaggagataaaattgttgtagatggttgatgtgaatttagtggaaagagttattggggatgagagaaagaggaggaggtaggtattgtagagtgtgagtggtggtgttggttggtgaaatattggttattagtagtgtgtttgtttttgtaaaatatttaagtaaattttttgtgaatagggtggtaaatagatattagtgtttttgttagttataaaatgtagtggtagtggttttttgtggatgattgtagtagtgttttttttttttttgttaggttgaaaagataattgtagaggaataagaaattttgtagtaaatgttggggtagaagtttatttataagaagttatagtttataaatgtagtttgaatagtagaaaaaaaattattgttttttaaagtaggaataatgttaggttatgaatgttttgttattggaatgtattggatattttgattttatattatgaaagtgatgtttaaattttttgatttaatataaattttatatgaaattttaataaattatgtatgaaatagtggatttttttttttgttagtgaagtttttatgttattaattaggttatttaagagtaaattattttataatgtaaattattttgttaaaaattatggtgaataaatttttgtaggtttaatatttaagatttatagttaagtaattttatatttttttttggttgtttttagataatattgaataaatatttaagatattaatttagtgtgtaaatattttaaattaaagtaatatggttttttttttagatgtatttttgtttagtgagtatttatgagatatatttttgatataaagtgttttttattgagttttttttttttttatttaaatgtaaaagtttatttttatgtatatttatagtagttagtttgttatatttttttattttttgaataaggatggtagtggttttgtaaagttttttagggttagtgatagtgttttttaaataatgtttatgtaatagaaagttttaagatgatttattatattgttttagtaatatttttaagataatgtggaattgggttggtttagataaataagattatataagttttttattgataaatttaaatagttttttaaaaaattatttttgttttaagaattatttgattatggatattagggttaatagtatttaggagttgggtgtggtggtttatgtttgtaatataagttaaataggaggttgagggaagttgaggtaggaggattatttgagttttggtgtttaagattagtttgggtaattaagtaagattttattttaaaaaaaagtatttagagttttttttttaaaatttgat

SEQ ID NO: 284 - DNA, 3120 bp, Artificial Sequence
  chemically treated genomic DNA (Homo sapiens)
attagattttaaaaaagagattttaagtatttttttttgagatagggttttgtttggttgtttaggttggttttgaatgttaaggtttaagtgatttttttgttttagttttttttagttttttgtttagtttgtattataggtatgggttattatgtttggtttttaagtattattaattttgatatttatgattaagtaatttttaaagtagaaataattttttaaagaattatttaaatttattagtgaaaaatttatgtagttttatttatttaagttagtttaattttgtattattttgaaaatattattgaaataatataataggttattttaagattttttattatataaatattatttaagagatattgttattgattttggagggttttataaagttattgttatttttgtttagggagtggggaggtgtggtaggttggttattataagtatgtataaagataggtttttatatttaggtaaaggaaaaaaaagtttaatgaaaaatattttatattaagagtatattttatgagtatttattaaatagaaatatatttagaagaaaagttatgttgttttaatttaaaatatttgtatattgaattaatattttaaatatttatttagtgttatttaaaagtaattaaagagaaatataaaattatttaattataggttttaaatattaggtttataaaaatttgtttattataatttttgataaagtaatttatgttgtaaagtggtttgtttttgaatgatttaattaatggtataaaagttttattaataaaagaaaagatttattgttttatatataatttattaagattttgtataggatttatgttaaattaaagaatttgagtattatttttgtgatgtagaattaaagtgtttaatatattttaatgataaaatatttatagtttgatattatttttattttaaaaaatagtaattttttttttgttgtttaggttgtatttataaattatggttttttgtaaatgggtttttattttagtatttgttgtaaggttttttatttttttgtagttgtttttttggtttaatagagggagaaaaagtattgttgtagttgtttgtaaaaagttattattattgtattttgtaattaataaagatattggtatttgtttgttattttgtttatagggagtttatttagatgttttataaaagtaggtatattattggtgattagtattttattaattaatattattatttatgttttgtagtatttgttttttttttttttttttatttttagtagttttttttattagatttatattagttatttgtagtggttttgtttttttttttttttggttattaatgtatgtgtttttgttgttagggaggaaaagaagttttttaatggggtagagtttttgttttttgttatgaatatgttttattttttgttgttttttatttgtttttttagatattgttattttattttgttaaatggtattataaaaataaaaattttttttggttttaaaaatagttttttttagtagattttttttaatatttttatttttttttttttttttttttttgttaaaaattttggatttgaagtataggaaatttatttttagtgttgtagtggggggtggggggatgatgtttttgtttttttgtttggtatgttgtagtggattttgtgttaaggaaaggttattggtttaagatagtgtgagggaaaattatttttttttttttttttgtagtaagtttggttatggtggttttagtatttattttatttttgagtttggtagtatttttattttgtttttagtgatattttggtgggttgtattaatatagttatatgttggttatgtgtgtttatatttagttaattggtgggtttttgatgggaatggggagtgttttggtttgtatttagtggattatatagttgtttttttttttgttttttgatttgtattttgtagtggggtatagggttttgtttaattgtatagtttgtttagttttagttttgtattttttgggggtatgtttttgtggttttagtttttagtaagtaaggaagttgatggtagttgatatgtatagtaaagagttgggggaggtttgtagggtagaaggattagtataagatgttggaggtgggagggagagtaataaattatattttgattgttatgatttttgtagtatagagaaataataatattaaatgaattataatgaataattttatattataagttattgagttgttagagtgatgatttgttagatagattatttgaattatatttgaattaaaaatagttattagaaaagttatgttagtagtttagtagtggagattagaattttggaagtttgggttgtttgagttgaagttttatttttgttattttagttttgtaattttagttatttaattttttagtgttttaattttttgttgtataaaatgggaatagaagtatagaatagaggagttaatatatatgaagtatttagagtagtttttgatatatatatagaagtgttgttagttattataaatttgaggttttaatgtagtattttaatgtaaattttatattgtatttaaattgaattaggtgatgtttaaatttttaattttatgaggttgaaggataaaatttaaattgttaagaatatataaagttaaatttaaattttggtttaaatggggggaaattagtttttattatttatttaaaatttaaaaggatattatattttaagttttttttgtttgttttttgagatagagttttgttttgttattaggtgagtgtagtggtgtaatttttgtttattgtaatttttattttttgggtttaagtgatttttttgttttagttttttaagtagttgggattataggtatgtgttattatgtttagttaagttttgtatttttagtagagatggggttttattatgttggttaggatggttttaattttttgattttgtgatttgtttattttggtttttttaagtattgggattatatgtgtgagttattgtgtttggtttaaatttaaagtt

SEQ ID NO: 285 - DNA, 2501 bp, Artificial Sequence
  chemically treated genomic DNA (Homo sapiens)
ttatatggttagaaagggtttaggtggtttttggtgtttttttagtttttgtttttatggtgtatttttttgttagttgtttttttttgtattttgttgtttgtttggtttggttgtgtgtggttttttgggagtttttattttgttgtggattttagtgattattaagtttgtatgtggtttgttgtaggtttgagtagaaggttttgtgtatatttattgtgttgtggttgtgtgggaggtttgtgttgtttgtgttatttattggttgggttttgtgggtgtagtggagtgggtgggtggttggtttggatgtgttttttttggttgtggttttgtgtgttatgtgtttttggtgggatgtgttatttttgggtttgttgtggtgtttttaatttgggttagggagtggggtggagggggtggttgggtggtttagaggagggtttttttttttttttttttttgaatgaattgtgtgatgttatgtataggaaattggttgggttgtgtagagaatgaagtaagaggataggtattatagttttgtttttgtttttttttttttgtgtttgtttttttgtgttgtttgtttgtttgtttgttgtgtttttgtttgttgttttttgtggttttgttgtgttgttgttgttgttgttgttagtagaaggtgttggggttttgggttttttttgttggtggttgttagtgtttggagtgggttgtgtggtgggagttttgggaggtggttgtagttagtgttgttgtgtaggattaggaggaggagaaagggtgtgtagtttggaggtggggtgtgttggtggggtgtagtggaagagggggtttaggggggagaattttgtagtagttattttttttaggaaaagagggaaaaaataaaatttttttttattatttttttttttttattttttgttgtattatatatagtgtgggtttttagtgtttggtattggtgggttaggtgtgttttgtttttatttatttagtagttttttggaaaatgtatttgttgtttggagtttaattagaagaggatttttgtttttgtttttggtttttttattgtttttttttttttgttttttttttggggaggtgtgaagtggttttgtggatagagatttatgtttgtgtttgtgtgtgtgtgtgtgtgtgtaaattgttgagaaggggaaaatattataggatttttgtgaatattggattgaaaattgtaatttatttgttgttgttgttgtttttttttttttttgagtttttgagatttttggttgggatttttgtggattgatatttttgtgaagtagaagtttgggaattgatttggaaatttttttaatttttattttttttttttgtgatttttgatttattgggaagttttaaattagttataattggagagtgttgaagattgatgggattgttgttttatgtatttgttttggttttataaaaaggaaatttgatagaggattatgttgtatttaaaaaatataagtaagttttttgtataggaaattggtttaatgtaatttttaatggaaatttttgagattttttatttaaagtgtatttgagtaaatttaatttttaggtagtttaatatattttttttagttgtgttatttgtagtgtgtatgttttgtttttatttagtgtgtatagggaaatgtatttgattttttatttattagtttgttttttttttaattttttagtattatagaggaagtagattgatattaataatatttattaataataatgtgttttatgaaataaagatttgaaaggaattggaataaaaattttttgtattttatgttaagggggaaatattagaattaagtgttttgtgtgattgaagatatttttttgtttaagaatgtaaagtatatttaataaaatagttggattataattttttttttttttttgggggttgtggggtgggagttggggtgagaggtgttgttggtttttgttgttttttttttgggaaggatggtgtatgttgggagaatagggtatgataattgggagatagtgatgaagtatatttattataagttgttgtagaggggttatgagtgggatgtgggagatgtgggtgttgtgtttttgggggttgtttttgtattgggtattttttttttttagtttgggtatatgttttatttagttgtattttgggatttggttgttaggattttgttgttgtagattttggttgtttttggtgttgttgtggggtttgtgtttagtttggtgttatttgtggtttatttgattttttgttaggttggtgatgattttttttgttgttattgttgtgattttgttgagatgtttagttagttgtatttgatgttttttattgtgtggggatgttttgttatggtggtggaggagttttttagggatggggtgaattgggggaggattgtggttttttttgagtttggtggggttat

SEQ ID NO: 286 - DNA, 2501 bp, Artificial Sequence
  chemically treated genomic DNA (Homo sapiens)
atgattttattgaatttaaagaaggttataatttttttttagtttattttgtttttgaagagtttttttattattgtggtaaagtgtttttgtgtggtgaagggtgttaggtgtagttggttggatattttggtgaagttgtggtggtagtggtgggagaagttgttgttggtttggtggagggttaggtggattataggtggtattgggttgagtgtaggttttgtggtggtgttgggggtagttggggtttgtagtggtgaggttttggtgattgggttttgggatgtggttggatggggtgtgtgtttgggttgggaggagaagatgtttggtgtgggggtggtttttgggggtgtggtgtttatattttttgtattttatttgtagtttttttgtgatagtttataatggatgtattttattattattttttggttattgtattttgtttttttagtgtgtgttattttttttagaggaaaagtaatgggggttaatggtattttttgttttagtttttattttatggtttttagagaaagaagaggagttataatttagttattttattggatgtgttttgtatttttggatgagggggtgtttttaattatgtggaatatttgattttggtgttttttttttggtatgagatgtaggaaatttttattttaattttttttggatttttattttatgaggtatgttattattagtaagtattgttaatattagtttattttttttgtgatgttgaaaggttaaagaaaaaataaattaataagtaaaaaattaggtgtgtttttttgtatatattgagtgaaagtagggtatatatattataagtaatatggttaaaaagaatgtattaagttgtttggaaattaaatttatttgaatgtattttaagtaaaaaattttaaaggtttttattgaaagttatattaaattaattttttgtgtagagaatttatttgtattttttaagtatagtatgattttttgttaagttttttttttgtaaaattaaaataaatgtataaggtaatgattttattaatttttagtattttttagttatagttgatttgaaattttttaatgaattaggagttgtggggagagggagtaaaaattaggaggatttttagattgatttttagatttttgttttatagaaatgttaatttgtaggaattttaattggagattttaagagtttgagaaaaaaaaaaggtagtggtggtggtagatgaattataatttttagtttggtatttgtagaagttttgtgatgtttttttttttttggtaatttatatgtgtgtatatatgtgtgggtataggtatgaatttttatttatgggattgttttatgtttttttaggagagagataggggagaggggatgatgaaggagttggggatggaggtaggaatttttttttgattaaattttgaatagtaaatgtattttttgaaaagttgttggataaatgaaggtaggatgtgtttggtttgttggtgttgagtgttagaagtttgtgttgtgtgtggtgtggtgaggggtggggagaaggaggtggtgggggagggttttattttttttttttttttttaaaaaggatgattgttatgaagtttttttttttggatttttttttttgttgtattttattggtgtattttgtttttgggttgtgtatttttttttttttttttggttttgtgtggtggtgttggttatggttgttttttggagtttttgttgtgtagtttgttttgagtgttgatggttgttggtagggagggtttggagttttggtattttttgttggtagtggtggtggtggtagtgtggtggggttatggagagtggtgggtgggagtgtggtgggtgggtgggtaggtggtgtggaggggtgggtgtgggaggaagggggtgggagtggggttgtggtgtttgtttttttattttattttttgtatagtttgattggttttttgtgtgtaatgttatatggtttatttaaaaaaagaagaaagaaagagtttttttttgagttatttgattgttttttttgttttgttttttggtttgggttaaaggtgttgtggtaggtttgggagtggtgtgttttgttgggggtatatggtgtgtggggttgtggttggggagggtgtgtttgggttggttatttgtttgttttgttgtgtttgtggggtttggttagtgggtggtgtgggtggtataggttttttgtgtggttgtggtgtggtgggtgtgtgtggggttttttgtttaggtttgtggtaggttgtgtgtggatttggtggttgttggggtttgtgatggggtgggggtttttggggaattgtatgtggttgggttgggtggatgatggagtgtggaggggggtggttggtgggagggtgtgttatgaaaataagggttggaaaagtgttgggaattgtttggattttttttggttgtgtga

SEQ ID NO: 287 - DNA, 6104 bp, Artificial Sequence
  chemically treated genomic DNA (Homo sapiens)
tagttttgaagtaggtagatatgtttatatttttttttgagttagtgtttggatttaggggattagattttttatttgatatggtagagagataagttatgttttaggtttttaaaaggagtttggaaaatataattaatttaagttaaatatttttattatttttttgtatatataataaagataaaaatatttattttattaaattgttgagagtaagaaagataatatatatatagtgtttggtatatggatggaatttagttgatggtagttataatatttataatattttttttttgttttaatttaatatgatttatatgattttttatatttattgtatatgtaatattttttagataattttatatttaggttattagtaaaatattgatattttttttagtatttatatagatgttttttttttaaagtttttagtaaaatttttattggggaattttagttgttttttatttttttttttttttatttttatttttatattaaaggtttttatttttaaggtatataatatgatattttgatatatgtatattttgtgaaatgattgtaataattaagttaattaatatattattattttatatagttttttgtgtgtgtgtgtgtgtgtgtgtgtttagagtttttgagatttattttttttgtaaattttaagtatatgttaattatagttattaggttgtatattaggtttttagaatttatttattttataattgaaaggttgtattttttaattagtattttttttttatttttaattgtagttttaaataattattattttaatttttgttattgagtttgatttgttttttgagattttatatataagtgagattatgtattatgtgtttttttgtgttttatttattttgtgtgttataatattttttaggtttagttatgttggtataaatgataatattttttttttttgaataatattgttgattaatattttattgtgtgtgtgtgataaatatatattatattttttttaataatttatttattaatggatatttaggttgtttttgtattttggttattgtgaattttgttgtttttttggtagttatttttgtatttttttttttagaagtagttttattgtagtttaaaagtgttttaggaaaatgatttagaagtaattattttttttggtatgttttttagtaaatatgatgatggaaagttttgatttttgtttttttttaaatagtgtaattgatttttagttgggattttttttagttaatttgatagttttatgtttttattaggttgaagaaaatgtatgtgttgtgggttgttgtattattgttgttggtggtgttgttgttattgttgagattttgtggttgagtttatattataaaggaattgtagagtagtaataaatttaatttgagttttgaatttaagtttttaggtgtgatttttttaattatgtggaaatttatgtaagaatttttaattagattttatgtttatttttattttttaagtaaagggtataggaatttggtttaaatgaatgggaataaatattatagttagattttattggagtgttgtaaaaatgtttttttttaaaattagattgttttaaaattgattttggtttttagatttttaagttaggaagtaagatagtaaaaattaagggttaaatagttaagtgattatttttttaaaattagtattttttttggtgatttttgttagattatgttttgtttagtattgaaatttagagaagttttaggaatagtgggatgaaatttaagtgatttgtttatgggaagttttattttttttttgtttgtttagtaaatttgggatgggtttagagaatgattttgtattttgtattagaagattttagtttttagagagaattttagatgaaatttttatttttttgttttatttttgaaaatttttatttgggaattgatttgttgtgataaataaaatgggaggagtttggttgaatagtttgtggattttggaaagtaaagtgaaatgttgttttaattaggtttgaattttttgtaagttattttgtgaaattggtgaatttgttagaatgaatttttatttatttaattttggtggattgtttattagggtgtttggtatggtgttaattgttggagaaaatgatttttaaataaaaatgaaaaaaatttttggtttttagtaaggagttaggtaatttttataaatttaaggagtgtttgagaggtgagttaatgattgttttttttgttttaaagagatagatttttatagttagttttgaaattgtttggggttatattagtgttttttggatgtagattttggttagtgttttatggtattagtttttgatttgtagttgttaaagatttgatagtggggagtatgtgtttattttgaaggttgaagatatatattatagttaggagtagaattttgattttttaaagtgatatggttataaaatttgtgtttattggtttttattttgtggttattgtggtatgggtgaaagttatgaattttttttttaggaaaatatatattatagatatatatatttataaatggttttaggaggtttttatgttagaaatttttggttttggaaaaaaattatttttgttgaagtatgtggtagttgagtgtaaatatttttttgttatagttttagtggtagaggtttaagtattatgttttatttagtgtttgtattgtggtttttgtaattttttaagtagttttgtattgaaaatttaggttggagatttgagtttaaattgttgaaaagttttaaggttttggatagggttttagtaggggttatttttttttaggatttggggtttattgtgtttaagatttgttatttaagttttgttttgtgtgtatgttgtttgttttatgttttgtgttgatatgtgttggtgtttttttgggttagttttagttttgggttttgtggttgttttgttggtgattttgtggagagtgagttttagatatttagtttttagttttgagttgttatttttttgttgtagttaagaaggaggagattaattaagggtattttagaagttaggtgtttttgttgttttttttgagtatggaggttattaattttttagggggaagagatgtagtgtgaggtaggggtgttgtgttaagaaattttgatgtttttggggattgaggataaaggtgtggatatgattttggggtatttggagttttgtgatttgtgttatggatggtatatttaggggttaatttttgttttgttttaaagaattttaagttagagtttttgtttttgtttatagttttgggatgttgttgttgtgtttattgtataggtagtgtttggattggttgtagtagattgtgtgttgtgtgttttattgggagatggtggagatgttgaaaagttttttttttgttattttggatgttgtgggtggtaagtgttttagtttttatttttgttgagttgaatgtttaggtatagtggaattgaaatttggttttgtgggatgtgagagttgttgaggttatgtgtaattgggtgtgatggagggtgtttgtttgtgatgtgtgtaggtttgatgtaagtaggttattgttgtgtgagtgtgtggatgtgattgtttgagagatttggaggtaggtttgggatatgtttgagtgaatattttaggatatttttttggttagtatttgttttttagtgtttgtgatttagagtgggtatatgttgggagatagtaatgggtttgggtgtgtgtaaatgagtgtgattggaagtgagtgtgagtttgatttaggtagggattatatagtattgttatatttgtttgttttttagtagaggattgaagtgtgggggtgggggtatggggttggaatagaatgtttttgggatattttggtaaatagtagttggaagtaaaggggtagttgtgtaaatggtttaggtaggtgatggatggtagggtaggaagggggaggtttagaggtttggatggaggtttttgtatttgtattttgtaatttattttttaggtttagtaggttattggttttttttttatatatgtaatggatttgaagagtattttgggatagtttggggagatggagatttggaaagtatttatggagattttatagaattttttgtgtggattaggaaatttttgtagatttttgtttatttgaggtttaggtgttgggttgttttttataatatttttttaagatgagattgtggtttttattttaaagatgagtatattgagtttttgtgaagttatttgtttatgattatataattaggaattgggttaattgtaattgaatttttgtttaataaagtttttgtttttagttttgttttttgttttttatgagttttggttttttgtgggtaatattagttattggagttagattttttgggtttagaatttatttttaggggtattaatttttaaaattttatttgggtaggggtttgggattagagttggaagagtttttataattttggattttttttgttaaattgtgaaattaggggtggagtggggtgagggtttaaaattaggttggattgagaggtgaaatttattatgatgttaaattgtttttaaatttttgtttattttaagggtgttatttgttggtgtttttattattttttattatttttattaatgattttaatgtaaatataagtgggatggttttgttggattttttaggttttggaagtatgagggtgatgtaatttaggggtaaaggatttttttgtttattggttgttgtgtattggtggaatttttttgatttatagtggtgggaataagagtagttgttggtgttgggaggtattagagatattgtttagtttaagtgttgttgttgtttttatagggttttgttggatgttgttgttgttgttgttattgtttttgatttaagttattttttgttaggtgagttttgagattttggtttaggtatatgtttttttttttttttttttttatttgttatttttttattttttttttttttttttttttttttttgttagtttttttattagatagtttttgttagtttgtgatttatattaggtttgtgttttaggttggattggatagttttaattttttggtttgttttttttgtttggttgtggattttagttttatttttttgtattgtatataggtttaggttagttttgggatatttaggttttttagggattgtgtatagagtttgaggtaagagaaattttttgtagatggtgtgattagggatggtgtttggagtttagtagttttagggaaattggtttagaatttggaatagagtggatgggtggtaaataggtatgatgattgagggataagtagttttaaattgtaagttttagttataggttttgggagtaaagagagaaagttttgggttttaatttaagagtaaaatttggtttttgtaggggattgaggtgttagtaggtggagtttaggttgagtattaaaattgatttttttattttttagattttaattgtagagataatttttgtggatagattttattttttttattaaggtgtatgtaaaagttttagaagaggaggatagttttgggtttttttatgggattagtttttgtgataggggtttgggagtatgttttttatagagatttggttaataggtttatatgtatttgtgtggttttggggagaagggtaggattgagattttttttatttagttttttttttaggattgtttttttagttttattagattgtgtatgttataggtttattgaattttttagaagtttattgtgttgatgaggaaataaaaaagaagagaaatataatgattagtttgaagttataaagttagagtgttagaagtaagatagaaaattaggataggagttaaggtttgtgggtttttagaattttgaattggtgtaggtggtttattttattttttttttgtaga

SEQ ID NO: 288 - DNA, 6104 bp, Artificial Sequence
  chemically treated genomic DNA (Homo sapiens)
tttgtaagggaagaatgagataaattatttgtgttagtttgaagttttaggagtttatagattttggtttttattttggttttttgttttgtttttaatgttttggttttgtggttttagattggttattatatttttttttttttttgtttttttattagtatagtggatttttgggaggtttagtgggtttgtagtatgtatagtttgatagagttggaggagtgattttagagggagagttgagtgggggaggttttagttttatttttttttttaaagttatatagatatatataaatttgttagttaggtttttgtggaggatatgtttttaggtttttgttatagaagttgattttataaggaaatttagagttgttttttttttttggggtttttgtatatattttggtgggaggggtgggatttatttatagagattatttttgtaattggaatttgagaaataaaagaattaattttagtgtttagtttaagttttgtttgttggtattttagttttttgtaggaattaagttttatttttaaattgggatttaagattttttttttttgtttttagagtttgtgattggggtttgtagtttagggttgtttgttttttagttgttgtgtttatttgttatttatttgttttgttttaggttttgaattaatttttttgggattgttgggttttagatgttgtttttgattgtattgtttgtggaaagttttttttgttttaggttttgtgtgtggtttttggggagtttgagtgttttgagattggtttaagtttgtgtgtagtgtgagagagtaagattggagtttgtagttgagtaggaagagtgagttgggggattgagattgtttgatttaatttagggtatgagtttggtataaattgtggattaatagagattatttgatgaagagattaatggagagagagggagaggaggaaagggagtgagaaaatgatgaatggagggagagggagggagagatatatatttgagttaggattttggggtttatttggtgggaggtggtttggattagaggtggtggtagtggtggtggtggtgtttagtagagttttgtggaagtggtggtgatatttgggttgggtagtgtttttgatgttttttagtgttagtgattgtttttatttttgttgttgtgggttgggaaagttttgttagtgtatagtaattaatgggtggaggggttttttgtttttgggttgtgttatttttatgtttttagaatttggaggatttagtaggattgttttatttgtatttgtattgaggttattgatggaaatggtgggggatggtgggggtattaataagtaatgtttttaaagtgagtgggaatttgagggtagtttgatgttatggtgaattttattttttagtttggtttggttttgaatttttgttttattttatttttggttttatgatttggtggaaagggtttaggattgtagggatttttttaattttgattttagatttttgtttaagtgagattttaaaggttaatgtttttaagggtgggttttgggtttaagaaatttgattttagtagttggtattatttatagagggttagggtttgtgggaaataagagatggagttgggagtaagaattttgttagataggagtttaattatagttggtttaatttttggttgtgtgattatgggtaagtaattttatagaggtttagtgtatttatttttgaaatggggattataattttattttgaaggaatattgtgagaaatagtttagtgtttgggttttagataggtagggatttataagagttttttggtttgtataggggattttgtaagatttttatggatattttttgaatttttatttttttggattgttttggggtattttttagatttattatatgtgtgaggagggggttgatgatttgttgggtttgaggggtgagttgtaaggtatagatgtggaagtttttatttagatttttggatttttttttttttattttgttatttattatttgtttgagttgtttgtatagttgtttttttgtttttggttgttgtttgttaagatgttttagagatattttattttggttttgtatttttatttttgtattttagttttttattaaagagtaggtaggtgtgatagtgttgtgtggtttttgtttagattaagtttatatttgtttttggttatatttatttatatatatttaaatttattattgttttttaatatgtgtttattttgaattatagatattaaaaaatagatattggttagaagagtattttgaggtgtttatttaaatgtgttttaagtttgtttttgagttttttgggtggttgtatttatatatttgtatgatgatgatttgtttgtattaaatttgtatatattatgaataggtgttttttattatatttaattatgtgtgattttaatagtttttatattttgtagaattgggttttagttttattgtgtttgagtgtttagtttagtagaggtagggattaaggtgtttgttgtttatagtgtttagagtggtaagaaagaagttttttagtgtttttattattttttggtggaatgtgtagtgtgtgatttgttgtagttggtttgggtgttgtttgtgtggtgagtgtagtagtggtattttggggttgtgggtggaggtaaggattttagtttgaggttttttgaggtagagtagaaattagtttttaggtgtgttgtttgtggtgtgagttatggaattttaggtattttggggttgtgtttgtatttttgtttttagtttttagaagtgttgaaattttttagtatgatatttttgttttgtgttatattttttttttttagggggttggtggtttttgtgtttaaaggaggtagtgggaatgtttaatttttaagatgtttttaattgatttttttttttttaattatagtgagggaataataatttggggttggggattgggtatttaagatttgttttttgtagggttgttggtagggtggttataggatttgggattggaattggtttgggaggatattggtgtgtgttagtgtagagtgtgaaataggtaatgtgtgtgtagagtagggtttggatggtggattttgggtataatgagttttggattttgaaggaagataatttttgttgagattttgtttggagttttggagttttttagtagtttaggtttggatttttggtttgggtttttggtgtagagttgtttgaagagttgtgaaggttgtagtgtgggtattgagtggggtgtagtgtttgggtttttgttattggggttgtagtagaagggtatttgtgtttagttattatatattttagtggaaatgatttttttttaagattagaggtttttaatataagaattttttgaaattgtttgtaagtgtgtgtgtttgtgatgtgtgtttttttaaagagagagtttatagtttttgtttgtgttatggtgattgtaaaatgaaagttagtagatgtagattttgtggttatgttattttgaggggttggaattttatttttgattgtggtgtgtgtttttagtttttagaatagatatgtattttttattattaaatttttggtagttataaattaaaggttggtgttgtggggtgttaattagagtttgtgtttagagggtgttagtgtagttttgagtagttttaagattgattgtaaaagtttgtttttttaggataggagggatggttattaatttattttttaagtattttttgagtttgtaggaattgtttggttttttgttgggggttgaaagttttttttgtttttgtttgaaaattattttttttagtaattagtattatgttaggtattttagtagatgatttgttaaagttaaatgaatgaaaatttattttggtaaatttattagttttataaggtagtttgtagaaaatttggatttagttagagtggtattttgttttgttttttgaaatttataaattatttagttagattttttttattttatttgttatagtaagttggtttttaggtagaagtttttaggaatgaggtagggaagtaaggattttgtttagggttttttttaaagattgagattttttggtgtaaaatgtgaagttattttttgagtttattttggatttattgagtgagtgaaggaagggtagagttttttgtgagtggattatttagattttattttgttatttttggaatttttttgagttttagtattaaatagagtatggtttaatggaagttgttaaggaaaatgttgattttaaaaaaatagttgtttgattatttgatttttgatttttattgttttattttttaatttaaaaatttggaaattagggttagttttgaaataatttgattttggaaaaaaatatttttataatattttaataaagtttaattgtaatgtttgtttttatttgtttagattagatttttgtattttttgtttaagaaataaaaataaatatgaagtttggttgaaaatttttatgtgaatttttatgtgattaaaaaagttatatttgaaggtttgagtttagagtttaagttaaatttattattgttttataatttttttataatatggatttaattataaaattttagtagtagtaatagtattattagtaatagtaatataatagtttataatatatatattttttttagtttggtagaaatgtggagttattaaattaattggaaaaaattttaattgaaaattgattgtattgtttaaagaagggtagaaattaaagttttttattattgtgtttattgaagaatatgttaagagaagtagttgtttttgaattatttttttaagatatttttagattgtagtaaagttgtttttggggaagggagtatagaaatggttgttaaagagatagtgagatttataataattaagatatagaaatagtttaagtgtttattgatgaatgaattattaaagaaaatgtggtgtgtgtttattatatatatataatggaatattagttagtagtattatttagaagaaggaaatattgttatttgtgttaatatggttgaatttggggaatattatgatatataaaataagtgaggtatagaaagatatgtaatatatgattttatttatatgtagaattttaaaaaataagttgaatttagtaataaaggttagaatggtgattatttggggttgtggttgggggtaaaagagaaatattagttaaaggatataattttttagttataagatgagtaagttttggagatttaatatatagtttggtgattatagttaatatatgtttgaaatttgtaaagagagtagattttaagagttttaagtgtatatatatatatatatatataggaaattatgtgaggtaatgatatgttaattaatttgattgttgtaattattttataaagtatatatgtattaaaatattatattgtatattttaaaaataaaaatttttaatatggaaataaaagtgaaaaaaaaaaagagtgagagatagttgaaattttttagtgggaattttgttgaagattttagaagaggggtatttgtataaatattgaagaggatattaatgttttattaataatttagatatagaattatttaaaagatgttgtatgtgtagtaagtatgaaaagttatataaattatattaaattgaaataaagaaaagatattataaatattataattattattaattaagttttatttgtgtgttaggtattgtgtgtatattattttttttatttttaatagtttaataagatagatatttttatttttgttgtatatgtaagggaatagtaagagtatttggtttgaattaattatattttttaggttttttttgaggatttgaaatatagtttatttttttgttatgttaggtaagaggtttggttttttggatttaggtattgatttagaggaagatatgggtatgtttgtttgttttagggtta

SEQ ID NO: 289 - DNA, 5976 bp, Artificial Sequence
  chemically treated genomic DNA (Homo sapiens)
agaggggtattttttattttaatttgaattttatgattgtattttttgttaggagatgaaagggataagattgtttgaaggattaatttttagtttttaggtaggttagtggttaaaatatttaggaagtgaaagtttgttttttgttataaggaaatttggagtttgtgattttattatgtggggtttgttatttgttaggtgatagggttttttatttatttgtggtgatttgaagggtaaggtttttggttaaatattttttttttttagtgatgtttgaaattttattgttagtgttggattttagtaagattttagagaaagtttaatttttggagtttgggttttttttagttgagatgttaggaaagtaatgggttttattatttgtatggataggtttgtgtatagttttaggggatttagggattttattagagtttatttatagatattaggttaaaagttttggatagtatttataatttttttgaaagaagaaaagtttttttttagagttttttttaaagtgtaaatggttttgggaggtttgaaatgatgagttggttggtatgaaagaattttttttagtagatgtaagagataatttgaggagttttagtggtgggggtgggggaaggagagtttgggggaggggaggttttaggtagtttataattttttttagaattggaaagggaatgtattgggttaagagggttaattatttatttttgtagagtgtttataagaattttatgaattaagtgttattaatatttttattttatagatgaggaaattaagatggtggagataaaatgatttatgttttttaattaatggtagagttagaagtgaatttaggttggagtgaagtggttttagtgtttaaatgatttttttattttagtttttagagtagttgggattataggtatgtattgttatgtttagttaatttaaaataatatttgttggggagatggggttttattatgttgtttagattggttttaaatttttgggtttaagtaatttttttattttttaattagttttttaaagtgttgtgattatagttgtgagttattaggtttgtttaggtatttttgtttgatataagagaaaatagagggtaggtatagtggtttatatttgtaattttagtattttgggaggttgaggtaggtggattatttgaggttaggagtttgagattagtttggttaatatggtgaaattttgtttttattaaaatataaaaattagttagatatggtgatgtgtgtttgtaattatagttatttaggaggttgaggtataagaattttttgaatttgggaggtagagagtgtagtgagttgagattgtgttattgtattttagttggggtaatagagtaagattttgttattaaataaataaataggaaatagagaagtaatttagtgtgttgtgaaagttatatagtatttgttttttataaggagtttttttgtgtttttgttttattttggatatttgatttattgtttttggagtttggagaaggatttgttgagaagtttgaagaatgtattaggtttgatttgattttgttgtttttaattgttttttaaaattttttttattgaattattagagtgtaatggaagagttgatgagagttgttgtagagttatgaggttaaggtttgttgggtagaagaaagtaaagttttaaaggtttttagggtttagtgatggtataaaatatgtatttttatataattgagaggaaaaaaataagtagatagtatagttttatgggggaaatgtttttttttgtatttttattattttgtttaaggtatgattttagtgggaaaggaaatattggagttttttttttttgagttttttggtgggttaagagtagagggagttaaaatatgatatttaaaagatttgattggaaatttattaaaattgaggggataggttgttggggggggtggtgttgggttgtttagaaattgtttgtatttgagaaattatttgatggatttagaggtatttttagttttgggtgaaatattttaaatatggttttttttaggaggaagtgaaataggggttgggttttttgaaagagtaatttttattttaaatatttattgagtagttgttatgatgagttaagaattttgtttagtgattgtttttgtattagtttatgttaatttatttatataaaggagaatattgatttttttaaggttatagggttagtgagtggttgattttatttaatgttgtgtagttttaattatgtttgaaggataaagggaaaggaggtgtttttgttggggtagataagttatttagatgtggttggttatagggagttagatagggaagttgtttaatttaatatttgtttgtttattttgtttttgttttttgatggaggatggtgggtgttggagggttattggtttaggatttgagatttttggtttttatttattttatttttgattttaaaattattttattggggatagaattttttggagaaggtgatggtggttatggtgtggttgtggtattaaaagttttattttgggggttagaagattttgggttttggtttttggttttgatattgatttgtttatgtgatattgaataagttatttgtaaattataggtttgggtgaattttaaaggttttttttaggttaatattaaaaaatagattgaaaattgtagttttagttggaagattgggattatatgagatgaagttgattgttagaagaaaggttttggaattagagaggttggttttagttttgtgttattttttattggttttaatttttttaagttttagttgtttatttattatatgggaataataatatagtttttgggttgttttgaaatgagtttaaatgagttggttagtggttgggtatggtggtttatgtttgtaattttagtattttgggaggttgaggtaggtggattatttgaggataggagtttaagattagtttggttaatatgatgaaattttgtttttattaaaaatataaaaattagttagttgtggtggtgtatgtttgtaattttagttatttaggaggttgatagaggagaattgtttgaatttaagaggtgaaggttgtagtgagttaagaatatattattgtattttagtttgggtgatagagtaggattttgttttaaaaaaaaaagagttggttagtgttaaatgtttagtatagagattggtatagtaatttttaatgtttagtatttattgttattattttttttttttttttttttttgagatagagttttgttttgttgtttaggttggagtatagtggtgtgattttggtttattgtaagttttattttttaggtttatgttatttttttgttttagttttttgagtagttgggattataggtgtttattattatgtttggttaattttttgtatttttagtagagatggggttttattgtgttagttaggatggttttaattttttgattttgtgatttgtttgttttggttttttaaagtgttgggattataggtgtgagttattatgtttggttttattgttattatttttattttttatttttgtatagagtatttatggtttaagaaatatttgttattttaattgtatgggagttttataatagtatagggagatatttttgattattatttttattaggagggtggagaaattgaggttttgggaggtggttttgatttagggaattaatttgttgatttattaatttatgaagttttatagttaaaaaagattagattaaaaaatgagaatttagtaaaggggttgaggtaggaggattgtttgagtttagaaatttgagattagttttggtaatatagtgagattttttttttagaaaaattttttaaaaaattaggttgtttgaggtagagtgtagtggtttatgtttgtaatttaatattttaggaggttgaagagggtggattatttgaggttaggagttttagattagtttggttaatatggtgaaattttgtttgtattaaaaatataaaattagttggtgtggtggtatatgtttgtagttttagttatttaataggttgagataggagagttttttgaatttggtaggtggaggttgtagtgagttgagattgtgttattgtattttagtttgggtaagatagagtgagattttgttttaaaaaatataaataaaataaataaataaaaaattaggttgttagtttagtggtttatggtttatatttgaaattttagtattttgggaggttaaggtaggaggattgttttagtttaggagtttgagattaggttgggtaatatagggagatatagtgtttttattgtttttgtttgttttgatttgtttttttataaaaaggtaaaagaaaaaaaaattagtttggtgtggtggtgtgtatttgtatttttagttattagagaggttggggttagaggattgtttgagtttaggagtttgaggttgtagtgagttgtgattgtattattgtattttagtttgggtgaaagagtgagattttatttttaaaatgaataaataaaaaattttaaaaaataaaagaatttagttaagtgtaaaagttttttttgattttaggttttagtgagttattggtggggttgggatttgaatttagtggaattagaattgtgtaggttttataatttatttagattttagtaattttaggttagagggttattgtgtttatgtgaggttgggtgggtgggttgttagttttgttttggggaggggtttgtgttgttgattggttgtggttggtaggtgaatttttagttaattagtggtatggggggtggtgtttttggggtttatttggttgtagttatgtatttttttttagtggtgttggaattgtaaagtatttgtgagtttgtggaagttagtttagattttagtttgttttagtttggtttgatttgattgtatttggtgtttgtttttgtttggtgtttttggttagttatgggtttttggagttgtagttttttggtgttgttgttgttgttgtaggtattttggattttttgatttgtgagggatgtatttgggttgtaagttttgtgttttagttttgtgttttttttttttttgttgttattgtttttttttttttaagaaagtttgggttttgaggagtggagtggtttggaagttttgtgtgttttggattttttagtgatgggagtggggggtgggtggtgaggggtgagtgtggtttttttgttttttttagtgtagattgaggtgggggtgtttggttgtggagtttgtggggtgggtttgtgtgggtggtgggggtgtgaagtggggtgtagggggtggggtgtggagaaggggtgttttggtgtaagttgagggggagttaggagttgtggggatgatttttgagggaaggagaggggtatttgtagaaataaaggtatttgttatgttaagaaaggttgtaaataggagtgagggttttggggataagaaagtgaggttggaggaggtgggagtgttttttgttttgaggagtggtgtatttttggtttaaggaaagtggggtattggagaataaagatatttttaataaaatgagaaaggagattgaaagggaatggtgggttaggttttgagggggtgatttggtggtttttttttgggagtttttgggggtttggtggttgtaggttttggggtgggggagggtgatgttgttgtttgtttgttttggggttgtgggttggggtttttttttaattttgatgttgggagtgagggaggggtggtgttgttggttttggtgagtaggagggaattttttgagttatttggttttatttattttttttttattttagg

SEQ ID NO: 290 - DNA, 5976 bp, Artificial Sequence
  chemically treated genomic DNA (Homo sapiens)
tttggggtgggggaaaggtagatggaattgggtgatttggagggtttttttttgtttattgaaattaatagtgttgttttttttttgtttttggtgttgggattgggggaggattttagtttgtagttttgggatgggtgggtagtgatgttatttttttttattttgaaatttatggttgttgagtttttaggaatttttgggagggggttgttgagttatttttttaagatttagtttattgtttttttttagtttttttttttattttattggagatgtttttattttttagtattttattttttttagattgggaatgtattattttttagagtgaggggtgtttttattttttttgattttatttttttatttttgggatttttatttttatttatgattttttttggtatggtaggtgtttttatttttatggatgttttttttttttttttgaagattgtttttatgatttttggtttttttttgatttgtattagggtattttttttttatattttattttttatattttgttttatgtttttattgtttgtgtgagtttattttgtggattttgtggttagatgtttttgttttggtttgtgttggagggggtaggaaagttgtgtttgttttttattatttattttttatttttattattggggggtttggagtgtgtgaggtttttaggttgttttgttttttaggatttgaatttttttggaagaagggaagtggtgatgatgggagaggaaggggtgtagggttggggtgtggagtttgtggtttgaatgtgttttttgtaagttaggggatttggggtatttgtagtagtagtagtagtgttgagaggttgtggttttaagggtttatggttggttggggatgttgagtgagggtaggtgttgggtgtggttgggttgggttgggttggagtgggttggagtttgaattgatttttgtaagtttataggtgttttgtagttttgatgttattgagagggggtgtgtggttgtagttaggtgagttttggaggtattgttttttgtattgttgattggttgagggtttatttgttggttatagttaattagtagtgtggatttttttttagggtggagttgatggtttgtttatttggttttgtatagatgtggtgattttttagtttggagttgttagggtttaggtgggttatgggatttgtatggttttgattttattgggtttgaattttagttttgttggtggtttattaagatttgggattagaaagggtttttatatttggttgagtttttttgttttttgggattttttgtttgtttgttttggagatggggttttatttttttatttaagttggagtgtagtggtgtgattatagtttattgtagttttgaatttttgggtttaagtggttttttggttttagtttttttagtagttgggagtataggtgtatattattatgttaggttaattttttttttttttgtttttttgtagagagataagttggggtggataggggtagtgggggtgttgtgtttttttgtattgtttagtttggttttgaatttttgggttgaagtgatttttttgttttggttttttaaagtgttaggattttaggtgtgagttatgagttattgagttagtagtttaattttttgtttgtttgttttgtttgtattttttgagatggagttttgttttgttttgtttaggttggagtgtagtggtatgattttggtttattgtaatttttgtttgttgggtttaagagatttttttgttttagtttattgagtagttgggattataggtgtgtgttattatattggttaattttgtatttttagtatagatggggttttattatgttggttaggttggtttggaatttttgattttaggtgatttattttttttagttttttgaagtgttggattataggtgtgagttattgtattttgttttgagtggtttaattttttaaaaaatttttttagagaggggattttattatgttgttgaggttgattttaaatttttgaatttaggtgatttttttgttttagtttttttattgagtttttattttttaatttagttttttttaattgtagagttttatgggttagtgagttagtaaattgattttttaggttaggattattttttaaagttttagtttttttatttttttaatgggaataatgattagaaatgtttttttatgttgttgtgggatttttatataattaaaatgataaatgttttttgagttataaatgttttgtatagaagtgaggggtaaaaatagtaataatagggttaggtatggtggtttatgtttgtaattttagtattttgggaggttgaggtgggtagattatgaggttaggagattgagattattttggttaatgtagtgaaattttgtttttattaaaaatataaaaaattagttaggtgtggtggtgggtgtttgtagttttagttatttgggaggttgaggtaggagaatggtatgaatttgggaggtggagtttgtagtgagttgagattgtgttattgtattttagtttgggtgatagagtaagattttgttttaaaaaaaaaaaaaaaaaaaaaatagtaataataggtgttggatattgaagattattgtgttagtttttgtgttaagtatttgatattgattagtttttttttttttgagatggagttttgttttgttgtttaggttggagtgtaatggtgtgtttttggtttattgtaatttttgttttttgggtttaagtggtttttttttattagttttttgagtagttgggattataggtatgtgttattatgattggttaatttttgtatttttagtagagatagggttttattatgttggttaggttggttttgaatttttgtttttagatgatttatttgttttagttttttaaagtgttgggattataggtatgagttattgtgtttagttattgattagtttatttaagtttattttaaaataatttaagagttgtattattatttttatatgatagatgggtaattgaagtttagagagattgaggttaatgagaggtggtgtaggattggaattaatttttttgattttagggttttttttttaataattagttttattttatgtggttttagttttttagttggagttgtagtttttagtttgttttttgatgttgatttggaagagatttttagagtttatttaaatttatgatttgtaaataatttgtttaatgttatataggtaggttaatgttaaagttaaagattaaaatttaggattttttgatttttagagtggggtttttaatgttatagttatattatggttattattattttttttagagaattttgtttttagtgaaataattttaggattaaaaatagaatagataggggttaaaggttttaggttttgggttagtggttttttagtatttgttgttttttattaaaagataaaaatagaatagataggtaaatgttaggttagataatttttttgtttgattttttgtggttagttatgtttgggtggtttgtttattttgataagggtattttttttttttttattttttaagtatggttagaattatatagtattaagtggagttagttatttattagttttgtgattttggggaagttagtgtttttttttgtataagtgaattggtatgagttaatataaaaataattgttaagtagagtttttggtttattatagtaattgtttaataaatatttggagtaggggttatttttttaaaaggtttagtttttattttgtttttttttggggaaagttatgtttggaatattttatttagagttaaaggtgtttttgagtttattaagtaattttttaaatgtagatgatttttgggtagtttagtattgttttttttaataatttgtttttttaattttaatgagtttttaattaggttttttggatgttgtattttggttttttttgtttttaatttattaggaggtttagagggagaaggttttggtatttttttttttattaggattgtgttttgaataagataatggaaatatagaaagaggtgttttttttatggggttgtattgtttgtttatttttttttttttagttatgtaaaaatatatattttatattattgttgggttttgggagtttttagggttttatttttttttatttagtaagttttggttttgtaattttgtagtgatttttattgatttttttattatattttgataatttaataaaaaggattttagaaaataattaggggtagtaaagttaggttaggtttgatgtattttttagattttttggtaagtttttttttaagttttaaagatagtagattaggtgtttagggtgaggtgggaatatagaggggttttttgtggaagataggtgttgtgtgatttttgtaatatattgaattgtttttttgttttttatttatttatttagtgataaggttttgttttgttgttttggttggagtgtaatggtgtgattttggtttattgtattttttgttttttaggtttaagagatttttgtgttttagttttttgagtagttgtgattatagatatatgttattatgtttggttaatttttgtattttagtagagatgggattttgttatgttggttaggttggttttaaatttttgattttaagtgatttatttattttagttttttaaagtgttgggattataggtgtgagttattgtgtttgttttttgtttttttttgtattaaatagggatatttaagtaggtttggtggtttataattgtaattgtagtattttgggaggttagttgggaggtgagaagattatttgagtttaggagtttgagattagtttgggtaatatggtgaaattttatttttttaataaatattattttgaattagttggatatggtagtgtatgtttgtagttttagttattttggaggttgaggtaggaggattatttgagtattggagttattttattttagtttggatttatttttggttttgttattagttgagaagtataagttattttatttttattattttggtttttttatttgtaaaatgggaatgttgatagtatttaatttataaggtttttgtaaatattttgtaaaggtgagtgattagtttttttggtttaatatattttttttttagttttaggaaaaattgtgagttgtttggagtttttttttttttaggtttttttttttttatttttgttattaaagttttttaggttattttttgtatttattggagaaaatttttttatgttggttagtttattattttgaattttttagggttatttgtattttaaagagggttttagagaaagatttttttttttttaaaggagttgtaaatgttgtttagggtttttaatttggtgtttgtggatgggttttggtggggtttttgaattttttgagattgtatataaatttgtttgtgtaggtgataaggtttattgtttttttaatattttaattggggaaaatttaaattttaggagttgagttttttttgagattttgttgagatttagtgttaatagtggaattttaggtattattggggaaaagaaatgtttggttagaggttttgttttttagattattgtagatagataagagattttgttatttggtagataatagattttgtatgatgggattatagattttaggtttttttatggtagaggatagatttttattttttgggtgttttggttattggtttgtttggaggttaaagattaattttttaggtagttttgttttttttattttttggtaaggggtgtagttatagggtttagattggggtgggaggtgttttttt

SEQ ID NO: 291 - DNA, 2501 bp, Artificial Sequence
  chemically treated genomic DNA (Homo sapiens)
tagaagtttttttttagagtgtgtttgggtatatatttaagtgtatggttgtaaatttttttttttaaagtattgaatagtattagatatttagtaggtatttaagaaatattgaatgttgtggtggtggtgagttagaagttataaaaaaaatttttttttaaaaataataataaaaagaattattttattgtgaagtttagtattataaaaatttaaataatttattataagtttttattaaaaaaaattttttttttaaagtaaatagatagataatgtttagtttatttgaaatgtttgaaagtagaggggttttaaggtagtgggagaaggtgtttgttttttgttggatatttgataattagttttttggatggtttggatgtataggagtgaaggtgtagatagtagtggggtttagagtggggttttgaggttgtgttgtggtttttttggggtttagttataattttggtttgattttagggtgaggtaggttaagggggtttgttattgtgtttttttatttttatttgggtttttatttttatagtagaggagaaagaagtttgttttttttgaggttagttgtgttagaggaagaagattgggtatgtttgggtagagatttttagattttgagtagtttgagatgttagtaattgtagttgttttaagtttgggttttgttttttagtgggatttttgtttagatgaataatttattttttgtaattttttaaaagtaaaattgtaaatgttttaggtatagaaaggaggtaaaggtgaagtttaggggaggttaggggtgtgaggtagatgggagtggatagatatattatttatttttgtgtttgttagaagaattagtagatatttttagaattgttttttatttatgttatttttataaattatttgtaaatgagggttatttggtatttttgttattttggagttatagaaataaaggatgataagtagagagttttgggtaggaggtaaaagttttgtgttttaattatagttatttttttgttgtatgatttgagttaggttattagatttttttgagttttagtttttttagtagtgtatatgggttatgtggggagtatttaggagatagataatttatttgttaaatttttttttttttggttaataaagttgttgtaattatagggattttttttgtttaggtgagtgtagggtgtagggagattggtttaatgtttaatttttttgtttttttggagattaggttgtttttttttggtagtttttttaatttttttttttttggaagtatgtgataattaataattttgtatatttaagtttagtggattttaatttttttatttgtgaaataaatgggattgaaaaattattttggttttaagatgttttgttggggtgtttaggtgttttaggtgtttttgggagaggtgatttagtgagggattagtgggaatagaggtgatattgtggggtttttttggaaattgtagagaggtgtattgtttttataatttatgaatttttatgtattaatgttatttttttgatttttttagttgtattgggtaaatttttgtttgttagagtgggttagtggtgagttagaaagggggtttattttaatagtgttgtgtttttttggagagtgttaatttattttttaagtaaaaaaagttagatttgtggtttattttgtggggaaatgtgtttagtgtattaatgtaggtgagggattgggggaggagggaagtgtttttttgtagtatgtgaggttttgggattggttggtttgttggaatttggttaggtttagttggtttggtgttgggtagttaggagtttgggttttggggagggtggttttgggtggtgtggtgggttgagtgtgggttttgtttttttgaggtgggtttgggtggggtggttgtatattagggttgtgttgagttgtgttagttgaggtgtgagtagttgttgaagttagttttttgtggagttggagttgggtgtggatttgttgaggtattgaggtatttagaggaggtgagagagtggtggtagataataggggattttgggttggtggtttagagttgagttaagtgtgtttgtgtgtgtttttgtgtgtttgtgaggatgtgtgtttgtgggtgtgtgttgtgtttataggtgtttttgtggtaggtgaatgatgggtgtgggttggtgtgtgtttggtttgtgtatatggtgtttttaagtgtgtgggtgatgagagttgggatgtgttggagattttggggtggagagtgggattataagtataggaatttttggttatgttttttgtttttggaaatttagttggggtgagggagggtgtggatgggattgttttgggagtttgtttttggttgtggttggttttaggttttaggtgtagtttgtttgtggtgtggggatgaagtttgtgtttttggaggggtttaggaagg

SEQ ID NO: 292 - DNA, 2501 bp, Artificial Sequence
  chemically treated genomic DNA (Homo sapiens)
tttttttgggtttttttagggatatggattttatttttatgttgtgagtaaattgtgtttggggtttggagttaattgtagttaaaggtgagtttttagaatggttttgtttatgtttttttttgttttagttgggtttttaggggtggggagtgtgattagggatttttgtatttgtaattttgttttttgttttggggtttttggtatattttgatttttgttatttgtgtatttagagatattgtgtgtgtaagttgagtgtgtattgatttatgtttgttatttatttgttgtagaaatatttgtgaatgtagtatatatttgtgaatatgtatttttgtggatatgtagggatatatgtgggtatgtttggtttggttttgggttgttggtttggggttttttgttgtttgttgttgtttttttattttttttgagtgttttggtgttttggtgaatttgtgtttagttttggttttataaggaattgattttggtagttgtttatattttagttggtgtagtttagtgtggttttgatatataattgttttgtttgggtttgttttaaggaggtgggatttgtgtttggtttattgtgttgtttgggattgttttttttggggtttaggtttttggttgtttagtgttgagttagttgagtttggttgagttttagtaggttagttggttttggaattttgtgtgttgtaggagggtatttttttttttttttagttttttgtttgtgttggtgtgttggatatatttttttatgaagtgagttataaatttggttttttttatttggagaatgagttggtattttttaggaggatatagtattgttagaatgagttttttttttggtttattgttgatttattttggtaggtaaggatttatttaatgtagttgaaaagattaggaggatgatattaatatataaaaatttataaattataaaaatgatgtatttttttgtaatttttagaaaagttttataatattatttttatttttattgattttttattaggttattttttttagaagtatttggagtatttagatattttaataaagtattttgaggttagaatgattttttagttttgtttattttatagatgaggaaattgaggtttattgaatttaagtatataaagttgttgattgttatatgtttttgggaaggagggaattggagagattattaaaaaagggtaatttgatttttagggaaatagaagaattggatattgaattaatttttttatattttatatttatttgaatagaagaaatttttgtggttgtagtagttttgttggttaggaaggggaggatttgatgagtgagttgtttgttttttgaatattttttatatagtttgtatatattgttggggaaattggggtttagagaagtttggtgatttaatttagattatgtagtaaagaaatgattatagttggaatataggatttttgttttttgtttggggttttttgtttgttattttttatttttgtggttttaaaatgataaaaatgttaaataatttttatttgtagatggtttatggagatgatataaataaaggataattttggaagtgtttattggtttttttgatagatatagaaatgagtgatgtgtttatttgtttttatttattttatatttttgattttttttggattttatttttgttttttttttgtgtttgaaatatttgtagttttgtttttaaaaaattgtagaggatggattgtttatttgaatagaaattttattaaaaaatagaatttaggtttggagtagttataattattgatattttaggttgtttagagtttggaaatttttgtttagatatgtttagttttttttttttaatgtagttgattttggggaggataggttttttttttttttgttgtggggatgggagtttaggtaggggtgggaggatatagtagtagatttttttggtttgttttgttttggagttaggttaggattgtggttaaattttagaaaggttatggtatagttttaggattttattttaagttttattgttgtttgtatttttgtttttatatatttaaattatttaaagggttggttgttaaatgtttagtagaggataggtatttttttttattgttttgaagtttttttgtttttaggtattttaaatagattagatattgtttgtttgtttattttggggagaaaattttttttaataaaggtttgtaatgaattatttaaatttttgtggtattgagttttataatgaaataattttttttgttgttgtttttgggaaagaattttttttataatttttagtttattattattatgatatttaatattttttaagtatttattaagtgtttagtattatttagtgttttaaaaaaaaaagtttgtaattatgtatttgaatgtgtatttagatatattttaagggaggatttttg

SEQ ID NO: 293 - DNA, 3486 bp, Artificial Sequence
  chemically treated genomic DNA (Homo sapiens)
aattaaagaggatgagattttttgtttgattttaggtgaatttttttttgttagttaggtaggaagttttgatttgaaaattagttttgggtattgttttttttattgttttttgggtattaatttttgttttttaattttagttgaattagtggatggtgatattataggtttaagatagttgtatttaaatattagtgattataggttatattaaggaaatatttgtaggtaatttagggtttgggaaggagttatttttagttatttgtaagatagtaggatttgtagattatagtataattaaatttagataaaattttgaattagtgagaattattaggaaggaaaggaatagaaaatgaattaatttgagtgttaggagatttgtatttagttttgattttggtattaattgaatgtatgtttttggataggaaatttttttgagttttgattttttttgtggtaaaaaggagagggttaaattatagggttttgagggttttttttagttgttatattttggagtgtatgagatgaggtaggtatataaagtggataagatgtggttaagaaaataagttatatattaagtttatttgtagtataggtgtttaagaaaattttgttgttgtgtaatattagaatggaaggttggtttttagtaaaatgtattaattttggtttaaattaagatgatgggtattgggtatgggggtggggaggtagttgaagatttattgagttttgttttagggtagttttgtttattgttttattttattttttattatggtgtttaagtttatattgagagagaaatttttagttgtaaaagggagaagagaaatgttggaatattagtattggatgttaggatatggttgtggtgttttaaaaattattttattatttggagtttgattttgaggggagtatttttattttttagttttttgaaagtatttattagtatttgaatattgttttgagtttgttggagtagtgaaatttggtgagagagaagggtggaggaaggaaggagttgttgtatttggtggttggatttaggtagaggaaattgttataattttgggaaagaatagaaaagtagaaagggatgagtttttatatgtagttaatgtttatggttttaattgtgtttgggaaggaagattttgggttaggggtgtatttttgttttttaaaattaaatgtgtttgagatagttataaagtttattaagggatttgagagattagagttttttgttttttttttttaattttgagttttttttttatttttattgagggagagtttgagtttatgataagtgttgtgtttatttttggttaatttttaaaagaaagatgtttgttttggttttttttttaggtttttagtttttttagggatggtagaaatttttgggttaaggttgagtgaattattgtttattgtttttattagtttttagtaaaggtatgttggtgggggggtgtttagtttttttagtaaatgttttgtggttttttttgtagattatgaggtgggggttgttggggagggttgagttgggggtagtttgttattttggtttttagtgagttgttggtgatttttgtggttttttggtttaggttttggttttttgggtgaggagtgggagggaggttggggtttaggtgttgtggtgaatttgttaatgtagtgttgggttttgaattttaggttttgttttaggtttttggttgtttggttagtttgtttgttttaattttaatttttttgaggttagttagagtaggtttgttggtagtagtatttttttagtagttatgtgattagttaattttttggtggtgtttggggaggtggtgtgtttgggaatgaggggaggtggtggaattgtgttggggttattttaaggttgtgtttgttagttttggtggggtggtttttgttgttgtaattaatggatttttttttttgtttaaatagatttgttgtgttaattatttttttttttgttagttttttttttattgttatattgggttattaaaaaaagggggtttgtttttttggggtgttttttttttttttttttgtttttgtttgtttatggttttgtgattttgatgttggtaaggtttggagagtggttgggtttgtgggatttgtgggtttgtatttgtttagatttggatgggttttgttattttttttgtttgtttggtttttttttttttttgtttttttgtttgttagtttatttgattagtggagatttggtggttgggttggggtttttttgtagtttttgtgtgtttttagagtttgggttgtggtttgttggggtttgtgttttttggttttgagggtagttgttgggtttttgagaggggtttgggttgtgtaggggtgttttgttttgtttggttttgtttttttgagagtgtgagagaggtggttgtgtagatttgggagaaagatgttaaatgtgtgagtgtttaatgggagttttagtttggagtggatggatgttaggtaggtggagtattttaagtttttggtttgtaggaatttttttggtttggtggattatgaagagttaatttgggatttggagaagtattgtagagatatggaagaggtgagttagtgtaagtggaattttgatttttagaattataaatttttagagggtaagtatgagtggtaagaggtggagaagggtagtttgtttgagttttattatagatttttgtggttttttaaaggtgtttgtaaggtgttggtgtaggagagttaggatgttagtgggagttgtttggtggtgtttttaattggggttttggttaattttgaggatatgtatttggtggatttaaagattgatttgttggatagttagatggggttagtggagtaatgtgtaggaataaggaagtgatttgtaattgatggtaatgatttttttttaattatagaatgtgtttggggttttgttttgtttgttggagggtgttaattttagtttgttttttggtgtattttgatttagttttgggagagttaattttattggttttaggtgtttagtgttatttggtttattgtttgtttgtttgtgatttttaagttagaaattggagatggtaagatttgataatttttttaatttaatatattgtggttttttttattagtaatttttaggtatgtgataaagttgggatgtttattaatggtttgttttttggttagggaaagagttttggggtggagaatgtattttttgttttttgaaaataattttattttgtgtttttaaaagttattggggatgatggatttaggattgtgggtggaggtagtgggttttttattttttgattatggggttaatttttgttagttattgttttttttaataaagattgtgtgttttttttaaaaattttttttgtgtttaga

SEQ ID NO: 294 - DNA, 3486 bp, Artificial Sequence
  chemically treated genomic DNA (Homo sapiens)
tttaagtgtaggggaaatttttaaaaagaatatataatttttattagaaaaaataatggttggtagaagttggttttatagttaggggatgaaaaatttattatttttatttataattttggatttgttatttttagtggtttttaagggtataaaatgaggttgtttttaaaaaatagaaagtgtattttttgttttagagttttttttttagttaggaggtggattgttgataaatattttaattttgttatatatttaggagttgttagtgagagggattgtgatgtattaagttagggaaattattggattttattatttttagtttttgatttaaaagttataaatagataagtagtgggttaggtagtattgaatatttaagattaataaagttagtttttttaaagttaaattagaatatgttgaaaagtaagttaaggttaatattttttagtaggtaaagtggggttttaaatatattttatggttgggaaagggttattattgttggttgtaggttgtttttttatttttgtgtattgttttgttaattttgtttggttgtttgatggattagtttttgggtttattaaatgtgtgtttttagagttagttggagttttaattaaaggtgttgttgggtggtttttgttgatattttggtttttttgtgttggtattttgtaggtatttttggggggttgtgggggtttgtagtagaatttgggtaagttgtttttttttattttttgttatttgtatttgttttttaggggtttgtgattttgaaaattgaaattttatttgtgttggtttgttttttttatgtttttgtagtgtttttttaagttttgggttaattttttgtggtttattgggttgaagaggtttttgtaggttgagggtttggggtgttttgtttgtttggtgtttatttgttttaggttagggtttttgttagatatttgtatgtttgatattttttttttgggtttgtatgattgttttttttgtatttttaaaaaaataaaattgaataaaataaagtgtttttatgtagtttgaattttttttggaagtttagtgattgtttttggagttaaaagatatagattttgatgagttatggtttgagttttaggagtgtgtaggggttgtggggaagttttggtttggttgttgagtttttgttgattaaatggattggtgagtgggagggtggagaggagaggggattaggtaagtggagagggtggtaaagtttgtttgagtttgggtgggtgtaagtttgtgggttttgtgaatttagttgttttttaaattttgttggtgttggagttgtagagttgtgagtaagtggggataggggagggggagaaaaatattttgaaaagatgagttttttttttttagtggtttaatatggtggtggaagggaggttgatgaagaagaaaatgattgatatggtgagtttatttaaatagaggaggagatttattggttgtggtggtgggagttgttttgttgaggttggtgagtgtggttttaaggtggttttggtgtggttttgttatttttttttgtttttgagtgtgttgtttttttgagtgttgttgggagattggttggttgtgtgattgttggaggggtattgttgttaataaatttgttttggttggttttggagaaattaaaattaagataaataaattagttaaatggttgggaatttggggtggggtttgaggtttggggtttggtgttgtgttggtgggtttgttgtggtgtttaagttttgattttttttttgttttttgtttgggaagttgggatttggattagaggattgtgaaggttgttggtagtttgttaggagttggggtggtgagttgtttttagtttggttttttttagtggtttttattttgtggtttgtgggggaggttgtggagtgtttgttgggggggttgggtgtttttttgttggtgtgtttttgttgggggttggtggaggtagtgggtaatggtttgtttagttttaatttagaagtttttgttatttttggggaggttgggggtttagggaagaagttaaagtgaatgttttttttttagaaattagttaggagtagatgtggtatttattatgaatttaagtttttttttaatgaaaataagaaaggaatttaagattaaaaaaaaaaaataaaaaattttagttttttaagttttttaataaattttgtagttgttttagatatgtttagttttgaaaaatgagggtatatttttggtttaggatttttttttttaagtatagttaaggttatggatattggttgtgtgtgggaatttgtttttttttatttttttgtttttttttgggattgtagtagttttttttatttgagtttagttgttaaatataatagtttttttttttttttattttttttttttattagattttattgttttaataaatttagaataatatttagatgttagtgaatgtttttagagggttgaagggtgaaaatattttttttggggttaaattttagatgatgaaatgatttttaaaatattataattatgttttaatgtttgatattagtattttagtgtttttttttttttttttgtagttggaaattttttttttagtgtgggtttgagtattgtggtggaaggtaaagtaggatgatgagtagggttgttttgagataaagtttagtggatttttaattgtttttttatttttatgtttggtatttattattttggtttgagttaaagttaatgtattttattggaaattaattttttgttttaatattatatagtagtaaagtttttttaagtatttatgttatagatgagtttgatgtgtagtttgtttttttagttatattttgtttattttgtgtgtttattttattttatatgttttagaatgtgatagttggaagggatttttgggattttgtggtttaatttttttttttttattatggaggaaattgagatttagagaggttttttgtttagggatatgtatttggttggtattggagttaggattagatgtaagttttttaatatttaggttggtttattttttgttttttttttttttaatggtttttattggtttagggttttgtttgagtttgattgtgttgtagtttgtaggttttgttgttttataagtgattgaaaatggtttttttttaggttttgggttgtttgtagatgtttttttgatgtggtttgtggttattgatatttaaatgtagttgttttgagtttgtggtattattatttattagtttaattaaaattgaaggataggggttgatatttagagaatagtaaagggggtagtgtttagaattagtttttaagttaggattttttatttaattgatagaaaagaatttatttaggattaagtaagaggttttattttttttagtt

SEQ ID NO: 295 - DNA, 8666 bp, Artificial Sequence
  chemically treated genomic DNA (Homo sapiens)
ttgtagggttttttttagtttaaagaaagtaattaggtgtttttattgtgttatgatttttatttttagttgggttttttagtttggttttaaagaataaaataaaaggtttttttgtttgagttttatttaatttattttttttatttataagaggtattttaaatttttatgatttttaaattttttaattgattattttatttttattttgtaaataagttaatttttttatttatagaaggaagtgttttaattttttttttgttttgatttttttttttttttaaatttatgtattttttgtgataaaatttataattattgttgtattttgagttttatttttttattatttttgagggattttaagtttttaaaaatattttattttgtttgtgtatttaattttttttttatttttttttaatttttttttttttttatttggtatttgtttttttaggtatatgtgtgtttaggttttttttattttttatttgttttattttatggtatagggttttgaattattataattaagttatgaaagagtagttaatgtagtgtttttatttttttgttattttattattttagttttttttttggttttttgaggagttttttataggttggtttttaggaataagtttaaatgaattatttttagtttttttaaatttttatgtttttgtatatttttttatttttgtttagaatattttttttttttttttttatttttaaatttttatattattttttaagattgggattagtttttagtatttggaagtttttgtttattagagataaatgagaatgagtttggttatttttttatttttttgtattattttgtgttttattttgtttttttaagagtattatatgttttatttaatttttaaataattgtttgaggtaagtatagttattattttaattatgtaaatgagaaaatagaggtttagatatgttgagtaattttgataaaagttaaagaattaataagtggaatagttgaggtttgaattttggtagtttgattgtagagatattatgtttgatttatttttttttgtttttattttatgtttgtttttagtttttgagtttgttgaatgaatgaataggtggtagtttttttttgttataagattgattagaattaagataggtttaaattttatgtgtagaatttttaaaattgtaaaggtagtgtaaatttaaaaaaagaatggtatttttaggaaagaggaaaagtaagtgtgagaataataataataataattaataaattttagtaaatttagtaaatgtagtaaatttttatattaaaagtttttggatatatattattatattttatggttatatgaaatatattataattttattttgtatataggaaatttgagattggtataaggagtatagagatttaggattttatatttttatttttttaggattttgtattttaggttgatatgtatgagtaaattgggagtataatgggttttttaatagaaaaattaggaaagtttttttattattattaattatttatataatatttttttaattttattattatttatattttaagttttagagtatatgtgtataatgtgtaggtttgttatatatgtatatatgtgttatgttggtgtgttgtatttattaatttattatttagtattaggtatattttttaatgttatttttttttttttttttttatataagatttataatggataatggattttaatttttagagtaaaatggttttatttaaggatgttataatttttttagagttttattgtaagatatgagatatatatatttaaaatttgtttttggtatttttaaagtagttaatttttatatttgtttataatgtatttaaatgttgtttttatatggttgtattttttattttttttattaatagttatatatattttttataagagttgaaagagtttttgatgtaggaatttatggtagagttttagagaaatttttgaatttattgaaagttttatttagaaatatatgtgtaagtgaatatattttttttaaaaaaaattattatttatttttttttttgagaagaaggtatttattttaatagatttttgaaggagtttattttttttatttttttatttttattaagaattattgtaggttgggtatgatggtttatgtttgtaattttagtattttgggaggttaaggtgggtggattatttgaggttaggagtttgagataagtttagttaatatagtgaaattttgtttttattaataatataaaaattagttgggtatggtagtatgtgtttgtaattttagttatttgggaggttgaggtaggagaattgtttgaatttgggaggtggaggttgtagtgaattgagagagattgtgtggtgttattttattttagtttgggtaatagagtgaaattttattttaaaaaaatatataaaataaataaataaaaagaaagaattattgtattagtgatggaaatgtgtttttttttttttattttggtaattatttttttttttttttattataaaatattttaaattaaattaaaataattttatttattgatagtttgaattttttttattattgttatatagttaattgagaggtattttgaggaaaatataaatggtatagtaatgtattgtagattttaataatatatttgatattttaaattgtttttattggttttattttaaaaattatatgttttaaaattaagtagatattaaaagtataagatatattgggtttataaggtttaagttaattagggattgaaatataatttttaaatagagttggattatttagtaggtagattaagtatgtgtttaaggtattagtaaagtttgagtaatttattttttaaaatgtagtatatgtttttgataagtttaaaaagtagtagttataggaaaaattagaatttttatttttttgtgtttgttatattttttagtgttgtttaatttttttttgtaagtgagggtggtggagggtgtttataatttttttagggagtaagttttttttggttttttttttttttttttttttttttttttttgagattaagttttgtttttgttttttaggttggagtgtaatggtgtgattttggtttattgtaatttttgtttttttttgggtttaagtgatttttttatattagtttttgagtagttgggattataggtatgtgttattaagttttgttaattttgtattttttagtagagatagggttttgttatgttggttaggtttgttttgaatttttggttttaggtgatttgtttgttttggttttttagaatgttgggattatagatgtgagttattgtatttggattttttttttatgtaatagtgataattttatttaaagtatttttttttttttttgagttggagttttattttgttatttaggttggagggtggtggtgtgattttggtttattgtaatttttgttttttgggtttaagtgatttttttgttttagttttttgagtagttggaattatatatgtgtgttattatggttagttaatttttgtatttttagtagagatggggtgttattattttggttaagttggttttgaatttttgattttaggtgatttgtttgttttggttttttaaagtgttgggattataggtgtgagttattgtgttttgttttaaagtattttttttttatgttttaaaataagattgtaagttagtttttaaagtggataatttaagagttaataggtattagtttaggatgtgtggtattgtttttaaggtttatatgtattaatatattatttaaatttataataatttttataaagtagggggtatttatatttttttttttttttataattatgaaaaatgtaaggtatttttagtaggaaagagaaatgtgagaagtgtgaaggagataggatagtatttgaagttggtttttggattattgtgtaattttgtttttagaatattgagtattttttttggtttaggaattatgattttgagaatggagtttgtttttttaatgattttttttttatttttttatttgtttataggtagaatttttttttgtttgtattaaataaattttatttttttagagtttgtttttatattaggtaatgtatatgtttgagaaatttttgttttagatagttgttttatatgtaggaggggaaggggaggggaaggagagagtagtttgattttttaaaaggaattttttgaattagggtttttgatttagtgaattttgtgtttttgaaaattaagggttgagggggtagggggatattttttagttgtataggtgattttgatttttggtggggtttttataattaggaaagaatagttttgtttttttttatgattaaaagaagaagttatattttttttatgatattaaatattttgatttaatttggtagttaggaaggttgtattgtggaggaaggaaatggggtgggggtggatttttttttaatagagtgaatgtatttaaatatgtttttgttggtaggtgggggagtgtggttgggagtagggaggttggagggtggtgtggggggtaggtggggaggagtttagttttttttttttgttaatgttggttttggtgagggttgtttttggttggtgtttttgggggagatttaatttggggtgattttaggggtgttatatttgttaagtgtttggagttaatagtattttttttgagtatttgtttatggtgtttttttgtttggaaagatattgtggtttttttagaggatttgagggatagggttggagggggtttttttgttagtattggaggaagaaagaggaggggttggttggttattagagggtggggtggattgtgtgtgtttggtggttgtggagagggggagagtaggtagtgggtggtggggagtagtatggagttggtggtggggagtagtatggagtttttggttgattggttggttatggttgtggtttggggttgggtagaggaggtgtgggtgttgttggaggtgggggtgttgtttaatgtattgaatagttatggttggaggttgatttaggtgggtagagggtttgtagtgggagtaggggatggtgggtgattttggaggatgaagtttgtaggggaattggaattaggtagtgttttgattttttggaaaaaggggaggttttttggggagtttttagaaggggtttgtaattatagatttttttttggtgatgttttgggggtttgggaagttaaggaagaggaatgaggagttatgtgtgtatagattttttgaatgttgagaagatttgaaggggggaatatatttgtattagatggaagtatgttttttattagatataaaatttatgaatgtttgggataaaaagggagttttaaagaaatgtaagatgtgttgggattatttagtttttaatttatagatatttggatggagtttattttttttattaggagggattattagtggaaatttgtggtgtatgttggaataaatattgaatataaattttgattgaaattatttagaagtggttgggtgtggtgttttatgttttgtaatttttttattttgggagattaaggtggggggaattatttgaggttgggagtttgagattagtttggttaataggtgaaattttgtttttattaaaaatataaaaagtagttgggggtggtggtaggtgtttgtaattttagttatttgggaggttgaggtaggagaattgtttgaatttgggaggttgaggttgtagtgaatagtgagatggagttattttattttagtttgggtgatagagtgagattttgttgaaagaaagaaagagagaaagagagagagaaaaattatttagaagtaattatatattgtgtttatttttaattgagtagggtaaataaatatatgtttgttgtaggaatttaggaaataatgagttatatttatgtgattattttagaggtaatatgtagttattattttgggaatatttgttaatatttttgtttttttattatttttagtttatttgatatagtttatttgtgataagagtttttaattttttatttttgaatagaggtgttttttttttttttatttttgttttgtgagggagttaggggaggatttaaaagtaattaatatatgggtaatttagtatttttaaaattttgttaatagtttgaatttgggagtttggttttgtagttttataatattttagaagagattttatttgtttaaaaataaaaaggaaaaagaaaagtggatagttttgataatttttaatggagaagggagaagaatatgtagaaaaggggaaatgatgttggtttagaattttaattatattggtgtttaatataggaatatttatttatataatattttaaagtattaaatttatattagtatattattaaatggatatattattaaatgggtttaagtattttatatattttaatttaattgatttattttttttttgttttggatttttattatgatttaaatatttatatatgggttattttttagattttttatattatgaaatataagaaaaatttttaaggttagttttatgattaagatgaaggattttattgaatatataaaataataaatatattgtaatattttgtttttttttttgtagttgtaatttggtttgtttatattttttttttgtttttttgaaaattgagttagttttatttttttaggataggatttaataattataatataatttagtataattttttgatttaggtaaattatgtaatttgtgtttagtatgaaatgtatttaaaaataagtaatttttttttaatattattatttttaaattaatataataaataatagttattttaaaataaattgtttatttttattatgtagtatttaaattttaaggttgttatgattgtagatagtattttaaaatttttttttggaaatggttttgtttttaagatgatttaggaattaaagaggtgattattttttgtttaatgaatttttaaattataaatttgggaagtgttttagttttttattgttgttgttataaattattataaatgtgttagttaaaataaatataaaattattattttatagttttagagattagaagttaaaaatgggtttataaggttttattttttttggaaattttaaggggtaatttgtttttttgttttttttagtttttagtgattattaaattttttggtttatggtttttgtattttttttgtggtttgtgtttttatttttgtattttttttttgattgtgattttttaataaaaatatttggggttatgttgggtttattttgaaaattttggataattttttttaagattattaattaaattatatttgtaaagttttttttgttatataagttaatgtattaaaagtttttgaggattaggatatagatattgggggtgggggggtattatttagtttattataggaaggaattttagggttaattaaattagtttttttattttatatttgaagaaattgaagttttggaattggagagtattatgttaaatgaaataagttaaatatagaaagataaatattatatgtttttatttatttgtgaaatataaaataattatatttttagtagtaaagagtagaatggtggttattagagttggggggtgggaggaatggggagatggtaattaagatataaagttttagttaagatgggaggaataagtttgattgttttttttgagatgtgttttatagtatgatgaatatagttaaatagtaaattttaaatgtttttatttgataaaaatgttaaatatttgagatgatggataggttatttagtttgatttaataattttttattgtgtttaaagattataattttatattgtattatataaatatatataattgtattattttaatatataattttaaaattaatataatgaaaaagaaattgaagtttaatatttttagaagttaagtgtaatttaaaagttttgtgagaatttgttttaataaataaataagttttttttttttaataattattatattttgtgtttggatatatagtagtgaataaaaaaaaaaaaaaaaaaaaaaatttttaggtttaatataattttaggaagaaattttagtagttgtattttaggggaaatataggaagttagtttggagtaaaagttagtttgtttttgtttttttgttattttgtttgtgttttatagtgttttttgtttgtgatgatagttttgtagaagtttggaggatataatggaatttattgtgtattgaagaatggatagagaatttaagaaggaaattggaaattggaagtaaatgtaggggtaattagatatttggggtttgtgtgggggtttgtttggtggtgagggggttttatataagttttttttttgttatgttggtttttattttggttttgattattttgttttttttggtagg

SEQ ID NO: 296 - DNA, 8666 bp, Artificial Sequence
  chemically treated genomic DNA (Homo sapiens)
tttgttagagagaatagaatggttagagttagggtgggggttggtatgatggaaaggaagtttgtgtagagtttttttattgttaagtagatttttatataagttttaggtgtttaattatttttatatttgtttttagtttttaattttttttttgagttttttatttattttttagtatataatgaattttattatattttttgaatttttgtggagttgttgttataggtagagagtattgtgaggtatgggtaaaatagtaaaggggtagggatagattgatttttattttaggttaattttttgtattttttttgagatataattattgaaatttttttttgaaattatgttaggtttggagatttttttttttttttttttttttgtttattgttgtatatttaagtgtagaatgtggtaattgttaaaaagagaaaatttgtttgtttgttaaaataaatttttataaaatttttaagttatatttagtttttgggaatgttgaattttaattttttttttattatattagttttaaaattatatattgggatagtatagttgtatatatttatgtggtataatatgaagttatgatttttgaatataatggggaattattaagttaagttaagtaatttatttattattttaaatatttgatatttttgttaaatgagagtatttgggatttattatttagttatatttattatgttatgaaatatattttaaaaaaaataattaaatttattttttttattttaattgaggttttatattttgattattatttttttattttttttattttttagttttagtaattattattttattttttattgttaagaatgtaattgttttatattttatagataagtgagaatatgtgatatttgtttttttgtgtttggtttattttatttagtataatgttttttaattttaaaattttaatttttttaagtataaaataagaaggttagtttaattaattttaaaatttttttttgtggtaggttgaataatgtttttttatttttaatgtttatgttttaatttttaaaaatttttaatatattaatttatgtggtaaaagaggttttgtagatgtgatttaattaatggttttgagggagattatttagaatttttagggtgggtttaatataattttaagtgtttttattagagggttatagttagagagaagatataagaatggaagtataggttatagagaaaatatagagattatgagttaaggaatttgatggttattagaagttggaaaagataaggaaatagattgttttttagagtttttaaaaggaatgaaattttgtggatttatttttgatttttgatttttagaattgtaaaataataattttgtgtttgttttagttaatatatttgtgataatttgtaatagtagtagtaggaaattaaaatattttttaggtttatgatttgagagtttattaaataagagatggttatttttttggtttttaaattattttggaaataaagttatttttagagaggaattttaaaatattgtttgtagttatagtaattttaaaatttgagtgttgtatggtggaagtagataatttattttaggataattgttatttgttatattagtttgaggatggtggtgttaaagaggagttatttatttttaggtatattttatattaaatataaattgtataatttgtttaaattaaggaattatattaaattatattatggttattaaattttgttttgagaaagtgaaattgatttagtttttaaagagataaagagaaagtataagtaaattaaattgtagttataaaaagaaagataaaatgttgtagtatatttattgttttgtgtatttaatgaagttttttgttttggttataaaattagttttaaaggttttttttatattttatagtatgaaaaatttaaaaagtaatttatatgtaaatatttaaattatgatagaaatttaaagtaaaaagaaaatgaattaattgaattaaaatgtgtaggatgtttaaatttatttgataatatatttatttgataatatattaatatgaatttagtattttaaaatgttatataaataaatgtttttatattaaatattaatgtagttaggattttaagttaatattatttttttttttttatatgttttttttttttttttattaaaaattgttaaaattatttattttttttttttttttttgtttttaaataaataaggttttttttaagatattgtaggattataaagttaaatttttgggtttaagttgttggtaaaattttagagatgttaagttatttatgtattaattatttttaaatttttttttaatttttttataaaataggagtagggagaggagaaatatttttgtttaaaaatgaggaattgaaaatttttattataaataaattatattaagtaagttaaagatagtaaaagagtaaaaatgttagtagatatttttaaaatggtaattatatattatttttggaatgattatatgaatgtggtttattattttttaagtttttatagtaaatatatatttatttgttttatttagttaaaaataaatataatatgtagttgtttttgaataattttttttttttttttttttttttttttttttttgataaagttttattttgttatttaggttggagtgaagtggttttattttgttgtttattataattttagttttttgggtttaagtgatttttttgttttaattttttgagtagttgggattataggtgtttgttattatttttggttattttttgtatttttagtagaggtgaggttttatttgttggttaggttggttttgaatttttgattttaggtgattttttttgttttgattttttaaagtgaagggattataaggtgtgaggtattgtgtttggttgtttttgaataattttgattaaaatttatatttgatatttattttaatatatattatagatttttattgataattttttttagtaagaaagataagttttatttaggtatttgtgaattggaggttaagtagttttagtatattttatatttttttaagattttttttttattttaaatgtttgtaaattttgtatttgataaagagtatatttttatttaatataaatatgtttttttttttagatttttttagtatttgagagatttgtatgtgtgtggttttttattttttttttttggttttttaagtttttagggtgttgttaggaggaggtttgtgattataaattttttttgaaaattttttaggaagttttttttttttttggagaattgaagtgttatttgattttaatttttttgtaaattttgttttttagagttgtttgttattttttgtttttgttgtagattttttatttatttggattggtttttgattgtaattatttggtgtgttgggtagtgtttttgtttttagtagtgtttgtattttttttatttgattttgggttgtggttgtggttagttagttagttgaaggttttatgttgttttttgttgttggttttatgttgttttttgttgtttgttgtttgttttttttttttttgtagttgttgagtgtatgtggtttgttttattttttggtgattagttagttttttttttttttttttttggtgttggtggaagagttttttttgattttgttttttaaattttttggagggattgtggtatttttttaggtaaggggatgttgtgagtgagtgtttggaggaggtgttattaattttgagtatttagtgaatgtggtatttttgaagttgttttaggttgggttttttttgggggtattagttggaagtagtttttgttagagttagtgttggtaaggaaggaggattgggtttttttttatttgttttttatattgttttttggtttttttgtttttagttgtgtttttttgtttgttagtaaaggtgtgtttgagtgtgtttattttgttaaaaagaaatttgtttttgttttgttttttttttttgtgatataatttttttaattgttaaattgaattggggtgtttggtgttatagggaaagtatggtttttttttttaattataagaaaaagtaaaattatttttttttagttgtgagagttttattgagaattgaaattatttgtatgattagaaagtgtttttttatttttttaatttttgatttttaggagtgtggggtttattaagttagaaattttagtttaaaggattttttttggagagttggattgtttttttttttttttttttttttttttttgtgtgtaaaatggttgtttggggtaagggttttttagatgtgtatattgtttggtataagagtagattttgaaaagatgaggtttatttaatatggatgggggagaattttgtttgtaggtagataggaaaatggggagggagttattggaaggatggattttatttttaaagttataatttttagattagaaaaagtgtttagtgttttagaagtagagttgtatagtgatttaaagattagttttaaatattgttttgttttttttatattttttatattttttttttttattgaaaatattttgtattttttgtaattataaagggggaagggaatatgagtgttttttgttttataggggttgttgtgagtttaaatgatgtattaatatatataagttttaagaatagtgttatatattttaagttaatatttgttagtttttgaattatttgttttgaggattggtttgtaattttgttttgaggtatagaaagaaaatgttttggagtaggatgtggtggtttatatttgtaattttagtattttgggaagttgaggtgggtagattatttgaggttaggagtttgaggttagtttggttaaaatggtgatattttgtttttattaaaaatataaaaattagttggttatggtggtgtatgtgtgtaattttagttatttaggaggttgaggtaggagaattgtttgaatttgggaggtagaggttgtagtaagttgagattgtgttattattttttagtttgggtgatagaatgagattttgatttaaaaaaaaaaaaaaatgttttggatagaattattattattatataaaaggaaagtttggatgtggtggtttatgtttataattttagtattttgggaggttgagataggtggattatttgaggttaggagtttgagataagtttgattaatatggtgaaattttgtttttattaaaaaatataaaattagtggggtttggtggtgtatgtttgtaattttagttatttggaggttgatgtaggagaattgtttgaatttaggagaaggtggaggttgtagtgagttgagattgtgttattgtattttagtttgggagataagagtgaaatttggttttaagaaaaaaagaaagaaagaaagaaagaaagattaagaagaatttattttttgaaaagattatgggtattttttattatttttatttataaagaaaagttaaatagtattaaagagtataataagtgtaaggaggtaaaagttttaattttttttgtgattattattttttaagtttattaaaaatatgtattatgttttaaaaaatggattgtttagattttgttgatgttttaagtatatgtttaatttgtttattggataatttagttttgtttaaaagttatattttaatttttggttgatttaaattttgtagatttagtatattttgtatttttagtgtttgtttgattttaaaatatgtagtttttaaaatgaagttaatgaaaataatttgggatgttaagtatgttattaaaatttataatgtattattgtattatttatattttttttggggtattttttaattagttgtgtagtaatgatagggaaaatttaaattattgataaataaaattattttagtttagtttaagatattttatgatggaggaggaagaaagtggttgttaggatgggagggagggaatatatttttattattaatataatggttttttttttttgtttgtttgttttgtgtgtttttttgagatggagttttgttttgttgtttaggttggagtgaaatggtattgtatgattttttttggtttattgtaatttttgttttttgggtttgagtaatttttttgttttagttttttgagtagttgggattataggtatatgttgttatatttagttaatttttgtattattagtagagatggggttttattatgttggttaggtttgttttgaatttttgattttaggtgatttatttattttagttttttaaagtgttgggattataggtatgagttattgtgtttggtttatagtggtttttaatgggggtgggagagtgggaagagtaggtttttttaagagtttgttgaaataaatattttttttttaaaaaagaaagtaggtaatgattttttttaaaaaagatgtgtttatttgtatatgtatttttagataaaatttttagtgaatttagggatttttttgaaattttattatggatttttatattaagaatttttttagtttttgtgaaaaatatatatagttattggtgaagaagatgggagatgtaattatataaaaataatatttggatgtattataaataggtgtaaaagttgattgttttggaaatattaagaataagttttagatatgtatattttatattttgtagtagagttttggaaggattatggtatttttgggtggggttattttgttttagaaattgaagtttattatttattataaattttatgtaggggggaggggggagggatagtattaggagatatatttaatgttaaatgatgagttgatgggtgtagtatattaatatggtatatgtatatatatgtaataaatttgtatattgtgtatatgtattttaaaatttaaagtataaataataataaaattaaaaaaatattatgtaaataattaataatagtgggaaaatttttttagtttttttgttaaagagtttattatatttttagtttatttatatatattgatttgaggtgtaaaattttagaagaatgaaaatataaagttttggatttttgtgttttttatgttagttttagattttttatgtgtaaaatgggattataatatattttatgtggttataaaatatgataatgtatgtttaaaagtttttaatgtaaaaatttattatatttattaaatttattaaagtttgttggttattgttattattatttttatatttatttttttttttttttgagaatgttattttttttttagatttgtattgtttttgtagttttgaaaattttatatgtgaaatttaaatttgttttaattttgattagttttataataaaaaaagattattatttgtttatttatttaataagtttagaaattaagggtagatatggggtgggggtagaggggagtaggttaaatatagtatttttatagttagattgttagggtttaaattttaattgttttatttattggttttttaatttttattaaagttatttaatatgtttgggtttttgtttttttatttgtatgattaggataataattgtatttgttttaaatagttgtttagggattaaatgaagtatgtaatgtttttagaagagtaaaataaagtatagaatgatataagaaaatgaaaaggtgattaaatttatttttatttgtttttagtaggtaaaggtttttggatgttgagagttgattttagttttgaagaatgatgtgagagtttaaagatggaaaagaaggagaaagatattttaggtagaggtaagaggatgtgtaaaggtatagaagtttaggaaaattgaaagtaatttatttagatttatttttgaaaattagtttgtgaaggattttttagagagttaaaagaaaaattaggataatgggatggtaaggaagtggggatattgtgttgattatttttttatagtttggttgtgatagtttaaggttttatgttatgaagtgaggtagatggaaggtggaggagatttgagtatatatatatttggaagggtaagtgttaagtgaagagaagggaaagttagaaaagaataaaagaaaagttaagtatataggtaagataggatatttttgaggatttgaggttttttaaaaataatgaagaaatagaatttaaagtatagtggtggttatagattttgttataagagatatatagatttgggagggagaaaaggttagaatggggaggaagttgaggtatttttttttatgaatgaggaggttagtttgtttgtagagtgaaaataagatggttggttaggaagtttgagaattgtaaaggtttggaatattttttatgagtagagaggatgggttgagtaagatttagatagagaagttttttgttttgttttttaaaattagattggagaatttagttgagggtggagattatgatatagtagggatatttgattattttttttaaattaaagaaagttttgtag

SEQ ID NO: 297 - DNA, 2501 bp, Artificial Sequence
  chemically treated genomic DNA (Homo sapiens)
gaaaattaggttgagtaggttggttttttaaagaaatttattgagtttttataatgttttttttatttgatgggagaaaaggggttttggaagattaagtgtgaagttttagaattttgtttggagttggttaggattatttaggtttgagtataagtaaagtgttgtttgtggtgttagtaagtgtgaatgtttttggtaatgttttttttatttaaagttgttttttatttagttaatttgttttgtgaagtttatatatttgttttgtgtaagatttttagttattttatttagttattggttttttttttattattattttttatgttttttttaaagaaaaatattattttttatttttttattaattttaaatagtttttatttttttgatatatttattatttaagaaaatggtttaagaattgggttagattattttgttttaatttttttgataagttttagagaaatttaaaggttaaaataagagtataagagtaaaaggtagagaaattaagaaattgaagattaggaaatgggggttggatgggaaagaaaaagaaattgttattaatgttatttggtttttttttttgtttaggtggattttagttttgttgaggttttgttagtagatttttagttttaattagtatttttatggtggtggtatttttattgtttttaaaagaaagagttttttttaattttatagggatttgggggatgaggagttagagttaaggtattttaaaaaaaatatgtgaagatttttattttgtaatatataagtaattgtttttttgttaagattttgttttttttagtattttgaattaaaatgattttgtaaataaaaattgtttatttttaggagaggtttatttatgtagttttttattaaagtttttaggtaataaatttataatttgtggttttttttttatttaatgtagtatttgttgaaatgttttaaatattttaagtaataaatgttgatttaaatttatttaggaagattaggaaggggaaaaaaagtatttggtatttaaatttttagaagagaatttaatgataggtttagtttgtttaatgataagtttagtattatattttttttttatgatgttttattattattgtataaattttttttattatttatgataaataaaaataagatatttgataaagtgggtttaaataggtaagagtgtaaataaagatttattgtataaatatgatgaaattgggattttagatttttaaagtataatttttttttgttttatgtgtgttaggttgttatttttaattttgaattagttttttttttttttaagggttgtatttataatgtaaaaatggaaagaattaaaaagtatatgtaaaatatgatttttgggatttttttttatttttatggttgattaatttaaatagaaagatatatttaagagaaaattgttaagtttgatataagttatgaaatttgtgaagtttaagtattgtttggggatgaatttaatttgtatgataggtgtagagttgttgtttttagatattttaagaaatatggagttattttgaatgatttttttttggttataagggagttattaatgtttttatagtgaaattaattggttggttgaaggaatagaaattttttgttttgtttattggggattaggagttgagggtagtggtgaatatttttaaaatattagttttggttttattggatatttagtgagtagtgtagttagtatttttggtggttttttggtttagtttttggtgtatgtgttttagtatttttgggtaggtttttttgtttttgtgatgtgttggtttgggtttggttttttggtgattatagtggatagggggtggagtttaagggggtggggagatgttggttttttggtttagttgaaaatggaattttttgttggttggttttttattttgttagagtgaggtggggtagtgaggattttgtgatgtgtttgtattttgtggttagagtggttttgagtttggttgtgtttgtgttaggtgtttttttttagaagtaatttaggtgtgtttgttggtttttgagtgttaggaaaagtttggagttaatgattggttgtttggttattgtatggggttttaagttgtagaaggatgatgggagggtaatgaagttgagtttaggttttttaggaaggagagagtgtgttggagtagtgtgggaaagaagggaagagtgttgttaagtttatggttaatggtggattatttgggttgttgtgtgtttgggggttgtggaatgtgtgaggagaataagggtatgtttagtgggggtggtagtgatgagggtttggttagtgttgtggtgtggggattagtggagaaggtgtgatagtttttggaagttggtgtggattttaatggagttaattgttttgggaggtgtgtgatttaggtagttggggttttagggt

SEQ ID NO: 298 - DNA, 2501 bp, Artificial Sequence
  chemically treated genomic DNA (Homo sapiens)
gttttggggttttagttatttggattgtgtgttttttgaaatggttgattttgttgggatttgtgttggtttttaggagttgttgtattttttttattagtttttgtgttgtggtgttggttagatttttattgttgttgtttttattgggtatgtttttgttttttttgtgtattttgtagtttttagatgtgtagtggtttggataatttattgttggttgtaaatttaatgatatttttttttttttttttatgttgttttggtgtatttttttttttttaggagatttgggtttagttttattatttttttgttgtttttttgtggtttggggttttgtgtagtggttgagtggttggttgttagttttgggttttttttggtgtttaagaattagtgggtgtgtttggattgtttttgggaaaaagtgtttagtgtggatgtagttgagtttaaagttgttttggttgtagggtgtggatgtgttgtggagtttttattgttttgttttgttttggtagagtggggagttagttggtaaagaattttgtttttagttgggttaaggggttggtgtttttttatttttttaggttttgttttttgtttgttgtgattgttgggaggttaggtttgggttgatgtgttatgagggtggggaagtttgtttaaagatgttaggatgtatgtgttagagattgggttagggagttgttaggaatgttggttgtattgtttgttggatgtttagtaaagttaaggttaatattttgggaatgtttattattgtttttagtttttaatttttagtaggtggagtagaggatttttgtttttttagttagttagttggttttattgtggagatgttggtggtttttttgtgattgagagaaagttatttaaaataattttgtgttttttaagatgtttgaaagtgatagttttgtatttgttatataagttaaatttatttttaggtagtatttgggttttataagttttataatttgtattaaatttagtaatttttttttggatgtgtttttttgtttgaattagttaattataaaaatagagaaaaattttgagaattatgttttgtgtgtgttttttaattttttttatttttgtattatggatataatttttaaaagagaaaaaaattagtttgagattgagagtggtaatttggtatatataagataaaaaaaaattatattttaagaatttgagattttagttttattatatttgtatagtaaatttttgtttgtatttttatttatttaaatttattttgttaggtattttatttttatttattatgagtaataaaggaaatttatgtagtaataatgaaatattataagagaggggtgtggtgttgggtttgttattaaataggttgaatttgttattaaatttttttttgaagatttaaatgttaagtgtttttttttttttttttaatttttttaggtgagtttgaattaatatttattatttaaaatatttaaaatattttagtggatgttatattggataggaagagaattgtaagttatggatttgttgtttaaaaattttggtgaggaattgtataagtggattttttttaaaagtgaatagtttttgtttatagaattattttggtttggagtgttgaggaagataaagttttaataggagggtaattgtttgtgtattgtaaaatgagagtttttatatgttttttttaggatattttagttttgattttttattttttaaatttttgtagaattaaaaaaagtttttttttttaaaggtagtggaagtgttattattatggaagtgttggttagggttgaaaatttattgatagagttttaatagagttgaaatttatttggatagggaagggaattgggtagtattaataataattttttttttttttttatttaatttttattttttagtttttagttttttaatttttttattttttatttttatgtttttgttttgatttttgagtttttttgaaatttattagaaaagttaggataagatagtttgatttaatttttgagttatttttttaggtagtaaatatgttagaaaaatgaaagttgtttggagttgataaggaaatggaagataatgtttttttttgagggggatataaagaatggtgatagggaaagaattaatgattaagtaaaatgattgagaattttgtatgaggtagatgtgtgagttttgtgaagtaagttgattgaatgaaaaataattttgggtagggaaaatgttgttgggggtatttgtgtttattagtattatggatagtgttttgtttatatttaggtttgggtggttttaattagttttagatagaattttaaagttttatatttgattttttaaagtttttttttttttgttaaatagaaaggatattatggaagtttaatgaatttttttgaaaaattaatttgtttaatttggttttt

SEQ ID NO: 299 - DNA, 2501 bp, Artificial Sequence
  chemically treated genomic DNA (Homo sapiens)
gtgttttagtttttgaatttatgttgtttgttattatattgtattgtttgtggatgatttatttgtttttgtagttttatttgaagaatttttttttttttttttttgaggtttgttttaaatattattttttttgtgaagattgtttggtgttttttaggagagagtgtgatttttttttttaggaatggtagtattttaaatatatatattttgtagtatattttattttgtatggtaatggtttgtttgtgagttttattttgtattagagggtgagggttttgaagatagtgttaggttttatttattttgatattttataatatttattatatgtttgatgaatgaatgtatagggggatggttgggtgtattttttttaattttttaattttttgaaataaataataaaattttatttttttttagaagttttggtatggttttttttattttgttatagttattgataattatttttattttttgtgtaatttattaggtaagaagtttatgtagatttatttttagtagtttatatgataaataaatattgtgtttgatttttaaatattaaattatagtatattatagatagatatagagttattatttaaagtatgatattttaattttaaaaggttttttttgaagaatattataaattttttttttttttaagatttgttgggtaggaaagatgggagaaaatgaattaatgtttatatagaaaggaggataatgggggtaaaaataatagatgaatgtatgggtggatgagagaatggataaaatgataggtggatatgttgattttggatagatgggaaatgagtggatatattaataaatagatatgtgggtggatgggtggagaagaggatggtggatggttgtggttttatgaagagatgtgaaaaaggaagtgtggaatgatggatgagaagttgtatgggaagatgaatagaagaataggtggttgaataaattaaaaggtgtgtggttggatgaatgaatgagtgggatgatagatggatttaagtggttagtggatggataggaggatggatggatgtgagagttttagaaggatataaggaaagatgggtggatagatggatgggtggatggaaggatatttaggaggatgaatgagtatgtgtgtggagagaggtgtttatttatattggtttgaatatatgggttagttgagttaaatgttagttttatgataggttattagtagttttttttgagttgttttgttaagaagttaaaatttatttaagttatgtggatttgttattgaggggaaaaagaatgagttttttttttttttatttggaagatttattaattttttattttttattttttattgtgggtatggaggtattgtgttatttagggtaagattttgttttttttttagttttttttttaggatatttaatattttgtgaaatttagagattttgttttagttggatttagagaaatttagtgggaaaggagaggttaaaggttgaatttaatggtgtaaggttttatggtttggttattttttgttttgatgttgtggggttagtgggagaagaaagttagtgtgtttttgggtgtaggggttagtggggtttggaggtataggtattttgtgatattttaggttttttgatttatgtttttggtagttttgattatttatagttttagtagagtatggggtgggggtagaggggtttgtttgggagggttgttattttttaaaatttttgtgggttgtttagttatagttttttttgtttgggtgtgttttttgtttgttttttttttttgttttaggttattgtttttaattttgaataaaaattgtagttaatttttgaggtagttttattgtttagtggattttagtttttgttaggtttggtttgttatttttgttttgttttttgttggtttttgttttgtgtttagggattttttagttttttttgtttgtgttttttgtttgttttggatattatggataagttttggtggtatgtagtttggggattttgttttgtgttgttgagtttggtgtagattggtgagtgtttgttgtagtttgggtagtaagatgggtgtggggtgtttagtgtggatttggtggtagtttttttggttgagttggttttgggggattggagttaagtgagttgtttgtgaagtgtattgggttttggaaagtagggttgggatttgtgttaaattgttggagaatgtgtttgtggaagtattatttggttgaaagaaaaagagaaagagaagaaagtttgttgggtaggttgttggtgtgtagttttgggtgaggttgttagagttgtagtatatggtagaaagtaattgtttttttggatgtgtatagttgttgtttggattaataggtttttgtgtttaagggtttgttaagttttattgggttgtgtttaggtagggtagagttgggtggggta

SEQ ID NO: 300 - DNA, 2501 bp, Artificial Sequence
  chemically treated genomic DNA (Homo sapiens)
tgttttgtttagttttgttttgtttagatatagtttggtggggtttggtgagtttttgggtataggagtttgttagtttagataatgattgtgtgtatttgggagaatggttattttttgttatgtgttgtagttttagtgattttgtttaaaattgtgtgttggtagtttgtttaataaattttttttttttttttttttttttttaattaaatggtgtttttatagatatattttttaatggtttagtgtaaattttagttttgttttttggagtttaatgtattttgtagatagtttatttgattttagttttttagggttgatttagttggaggggttgttgttgggtttgtgttgagtattttgtatttattttgttgtttaggttgtggtgggtatttattgatttgtgttaggtttagtggtatgaggtagagtttttaggttgtgtgttattaaaatttgtttatggtgtttggagtgaatggagggtgtgggtgaaaggagttggaggatttttgggtgtggggtaggggttggtggaggatgggatgaggatggtggattgaatttggtagaggttggggtttgttgggtaatgaggttgttttggaagttggttgtagtttttatttgaggttgaaaatagtgatttaagatggagggagggagtgagtgaaggatatatttaagtaaggggggttgtgattaagtagtttgtagaggttttaagaagtagtagtttttttgggtgggtttttttgtttttgttttgtgttttgttgaggttgtaaataattggggttgttagggatgtgggttggggaatttggagtgttgtggggtgtttgtgtttttgagttttattggtttttgtgtttagagatgtattggttttttttttttgttggttttgtggtgttaggatagaggatgattgaattgtaaaattttgtattattgggtttagtttttggtttttttttttttgttaaatttttttgaatttggttggagtaagatttttgggttttataggatgttggatattttgggagaggagttggagagagggtgaggttttgttttgggtggtgtagtgtttttgtgtttatagtggggagtgaggggtggggagttggtgaattttttaagtggaaagagggagagtttattttttttttttttaataataagtttatatggtttgaatgaattttagttttttggtagaatagtttagggaaagttattgatggtttgttatagggttggtatttggtttagttaatttatgtgtttaagttagtgtgaatgggtatttttttttatatatatgtttatttatttttttaaatatttttttatttgtttatttatttatttatttatttttttttatgtttttttggggtttttatatttatttatttttttgtttatttattaattatttaggtttatttattattttatttatttatttatttaattatatattttttaatttatttaattatttatttttttatttatttttttatataattttttatttattattttatatttttttttttatatttttttataaaattataattatttattatttttttttttatttatttatttatatatttgtttattgatatatttatttattttttatttgtttaagattaatatatttatttattattttatttatttttttatttatttatatgtttatttattatttttgtttttattatttttttttttgtgtaaatattaatttatttttttttattttttttatttagtagattttaaagagaggaagagtttgtaatattttttaggggaagttttttgagattgaaatattatattttgaatgataattttatatttatttataatatattatggtttaatgtttggaaattaaatgtagtatttatttgttatgtgaattattaaaagtaaatttgtatggattttttgtttggtgagttatatagaaaatgaaagtgattattagtggttgtggtaagatgaaaggaattatgttaggatttttgagggaaggtaagattttgttatttattttaagaaattgaaaagttgagagaaatgtatttagttatttttttatgtatttatttattagatatgtaatgagtgttgtggggtattgaggtaaataagatttggtgttatttttagagtttttattttttggtatggaataaaatttataagtaggttattattatgtaaggtgaaatatgttgtaaaatgtgtgtgtttggggtgttattatttttagagaagggagttatatttttttttggagaatattaggtagtttttataggggaagtgatatttgaggtaggttttaaaggaaaaggaggaggaattttttagatgaaattatagggataagtaagttatttataggtagtatagtgtagtgatgaatagtatggatttaggagttagaatat

SEQ ID NO: 301 - DNA, 16579 bp, Artificial Sequence
  chemically treated genomic DNA (Homo sapiens)
tgttttttaaaatgatgtttagttgaattagttaatggagataaaaatatttatatataatttttttttaagtttattagttattttatagattagttataattttggttattttaatgagttaatttttttttagagatattataaattttttaaagatggaaaataattgttatttttttgaataatgtttattatttaaaataatgtatataaaagttgtttaataaatttttgttgaattgagagaaaatataaaaaattgaaagtagtttgtttgtaataagtgtttgttaagttttatagatttttttttttttttggaattattgtaataaatatttgatttttgatttgtaggattaaaatgtgattttttatattttaataggagtaagtattagttttgtaattttttttgttaatagaataaaaatggaatgtatgtttgttgtttttatatgttggttgatatttatgttgaatattttttttataatgtagaggtttttttgttttttgttttgtgttttatttttgtttattatagagatattaatgatgttatgtgtttttttgtattattagtgtagtagtttttattatgttttttgttttggttttattgtagtttaattaaataaatggaaatgggtagttattgaaaataaatagtaattgtaaaagttttgttttttaagaaattttttgtattgtattttgttttgttttattgattttaagatttttattgtttttttgtgtttagaaattagattttttagtttgttttgttttagttagataaatgttttataaaaatgatttatattttttagattgtggggagagaagaaaaagattttgagaaagtgattaaggagggagtaagagtgatataatttttgatttaatttagttggattgtgttttttatgtttttatttttttttttataaaaaagatagtgtttttgatgttttgttttaggtagttttttagggtgagtgtagatgtgttgagttatttggttgttttgaggattggtttagagagtttttttttttattaatgaagttatttttttttggtagtttggttttttttattattttatgttggaatttggttttggtttgtatagttttgttgtgatgtagatggttttttagttaagttttagagaaatttgtttaattatgaataggatatttatagtataggagaaaaaaaaatttattaaaataaatattttattgtaatattttgatttgggggttggagagtaaaaatttaatatttgatgtttgggaaaaatttaatgttttatggttttttaaggaaatttgtttgtgtttaatttattagagtaatttatatattttgggttaaagtataatgagattgttattattattttgttttttgtaagattttttttttaagaataaaaagaaggtaataaagattttatatttttgttttttttagaaagttaaagagaatttaaagtgttggatgaaatgtttgtttttaatttgtagtgttttatttaaaaaaaaaattatgatataattttagaggataggttttttttttttagggtttttgaaagttaaaagtatatttttaatttgtagtattattgtattatttagtgaggataatttgtttagttgtgtttaggattagttagattaaggagttgaaattaagttttttttgaatttgaatgggattggaattttgttatttttagagtagtaatagatgatgttatgtttaagaatattttatttgattaataaaaaaggagaagtttgaaatgtaattttaaagaattttagaaggaggtttagatgaagataataaaattttttggagatatatttgttatttatattttttttttttaagttattggtttgttgtttttgagtttagttaaatttttaaagataagattaaagtaaggaagtaaggtatatagtttttggtttatggttttttttagatataagtattgtgaatgaagattttgttttatttatatttgggattttggagtttttataaagaatatttttagtataaggatgtgatttaaagggggatttatagaataatattttaattattgtttgatttatatttgagtgtaatggataaataaatataattttagttataaaatttgaaaaatatatatttttttatttaaaaatttttgatagttttgttaggtattggagaattagaaataaatgtttttttatttttttttttttgatgaaggaaagttattaaaaatagttatatagaaataataatataattgtagattttattttaaatatagttggtatgttttttttttttttttttatttattttttattttagatagttagaggggaaagtttgttttagagatagaaagaagatatttatggggtataattttattttagttatttgatagtttgaagaagtatttaattttttgaataataatgttataagttaaagaagagaaaagataggtagtttaaagttttttaatattgtgtatattttaattttttaagttagttttgagaaagtgtttttgttttgtagaagtatttggttaagtgttgtgaagtttattggtattaaaagaaattaaaaattttggaggattagagaattaaatttggtaatataaatgaaaatattttagaatgtaaaaagtatttaatttattatttttaattatgttttattatatatagatggtattatttatagtgaatgttaattattaatatttttttaaaaatgggtattaatttgttattagttgtttgtttttgatttagtttttttttgttgaaaggttttatttaattgtattataaagggataaaagggtaaaagataataagttttttagattggtagatttgttatttataaaatggttttgggtaggttatttgaattttttgaaatttaattagatttatttaaatttaagaatgagaatataaatttatattttgaagtgttttatagaaaggtttattttaatgtttggagtatatattttaatgaatatttattttattttatttttttttatttttgaattaagtaattttgaatttaaagttgttatgattagtattgaaaagattattggattattaattgtgtgattttgggatagtaattttttgtattttagtttgtttatatgttatatatgaaggttgaagtttgattttgttttgtgattattattttaaatatttgatgaaattaaattttagtgtttggaatggtagtataataaatttattaagaataaataatttattgtaaaaatatattgatttttaaatgatgtaattgatagttatattattgtagagggttgataaataataaaagaaatgaaagatgtatatggtgagaattgaaattattttgataagttttttatttgtttattatttaaaattaatgattatgttgaatgtttataaattataaaatataaaagaaattttataaatgtgtatgtataggagtttaagttattaaaagttttaaagtataagtttaaattaaattaattaaagaagttgagaggaaaaattggtttttatttttaattattattgttttgaggttttatgtttaatataattttttaagtagaggttttagagagaagagttgtgaggatatttttatatttgtgtagaaggaaaagtttgttatttattttagtatttttagtgttatattgatgtgtattttggatttattttgtttttattgtataaatttatatttgattttaaagaaaaggaaaatttaaagttttttttttttaaggggatagaaattttttgtgttaattgtttgatttttttttttgtaaggttttattggaaattttttgtaatataatgtaggggatttttttatgtgttgatgttgtttatatagtggggtgggtttgattgaagaaaaaaaattgtatatatgtatgaaagattatggttttatttttggaaagtatgaaaggtgattgatatttttaagaagtttttgttatttaggaaaattattaaatattttatttagagatatttggaaagattgaaggaaaggaagaatgaagaaagtagaatttagatttatgtggggagagatttgtggtagaggaaaagtattttttttgaatttgataagggatttgtttgggggaattttttgtttagttttttattattagggttttttgaagttgggttttttattgggtagttttttgggagtgtagtggggaatttttatattttttttttaggtttttgaaggattttgtttttttagtgttttttttaggttggtaggagttttgagtttgatatttttttttgatgggataggtaagttttgtgggtgtgtaaatatgttgtaattaagttttttgttgattttatagttttgtgtgtttttgagaagaagtgattgtatttaattgtttattgttggtttgttttttaagagtttgggggttttttttttttaatttagaattagttgtatggggggtggggaagtgggggtggggaaggagtgggagggtagtggtttttgtgagtagagtgatgttattgagtgagtttttgaatggggagtgttgttgtttttaagttgattggtattttttgttaggaagaaatgttaagaggtgggagtgtttggggagggaggtaggtggtttttattgtaggtgtggggagttgtttttttgtttttttgtttgttttttaagtttggatttttaggagtggttgaagttgtggagtgtttttggagtttgtgaatgaatttttttttttttttttttttttttttttgttgagttttttttttggttttgatggtatagtgatataatgatgatgggtgttataatttgtatttgaatttgtaggtgagttgttttgagtttttttggggaagaattttaggtgtgtggatgtaatagttgagaatattaggtgttgtggataggagttgggattaagatttttggttagttttgtatttttttgtattttttagtattgttttgtattttttgtatttttttttgggttattatgttttttatgtgatttgtttgggtaatgttgaatttagttgtgtagtgttgtagtgaattttttttttaaattgtaataagttgttttttaaggtaattatgttttttttgttttttttttaaaaaataaaaataaaaaatttatagaaaaaaatttgtgagtttagaaaaaagaagtaattggtagaaggttttaattaaggtaaagagttgtaaggtgaagttaagaaaatgtaggtatttaaaaaatgtaggtaatttttataaaggtttttggggagaggtatatagagggattttggtgttgaaaaagatttagataaaagaaatttagggtggggtgggggtaaaatgattaatggaattgggggaagggagggaataaattgtaaagaaattatagaaaagtggtgggtttttgagttggagagaagagagggatttttggtattttgatttttttgttgttgttgtttttaatatgtttgaggtaaaagtttgaatggggattattaagatttgttatagataagtttttgaagttgttttggtgtaggttatttggttttttagtttttggtgtgtggttagtgtttggtgtttttggaaagttatttttgggtagtttttgatagtgtgatttggtgtttaagtagtttgggattttgtgtggatttgatttttttagattgtaggtagtttgggaggaggtttggttgggggaggtgtaggatttttgttgtgtttttttgatgatttggggattgttatggtttttttttggtgtttttgggtttttttgttttgtatgtggtgtgaaggggttagtagggaaggagtagaggatggggggtggggttgttggagttttgtggaggtttgggaggtttttgggtgggaaaagtttgttttgaattggtagggatgtgtaataattttttttattttgaagagtgaaatagggtttgttgtttttattttaataagtaaattggtatttagagtgtattgtagataaaggtggtttggggatttgaattaggggtttttgggttagtttttttgtttagattataggagttttttgtttttttatatattttttatttttttttagttttttgttttagttgagtaattttattggtaggtttagtggtagtggtgtgtgtgtgtgttgggagttttgggggatgtttttggttggagtgttttattgttttgtagaggtgtgggtgttgtagggtgatatttttggtgtgtgtagatttagggtatttgggttgttttggtttgtggtttgtgttattgggtgtggagtggtttgggtgttaggtagaggagagtggggtagaaaaatagtgttatagtttaaattatttgttttttaatttaattgtgttttggtaagttttgtatgtttttgggagatgttgtgggaagggggagaaatttatatggtgtttggagagttgttttgttgtgtgtatatttgtggtagagtttttttgggttgtgttttttatttttgtgtttttttttgtttttattttttttgttttttttttttttttttagtttttgttttttttttttagtttttgtgtttttttttttatagttgataaatgaatggttagtgtgaaatttttgttttttttgtgttttaaggtagtagggagggaggagtgagggaggtggtgtgtttttttggatttgtttttagtttagtttataagatttgtagaatttagatgtttaggaattgggagttttgtggtgggtgtgggtgttttttgatggagaagttttgtataggtggagaaaaataagttttttagattaagtgtgtattttttataattttgtgtttaaggatggaaggttttagtttttttttaagttatttattttgtattttataatttgtggtgtatatttaggagtttggaggattttgaaaaaaggttttggtttgtgtaaagtgtagagatgtttttttgtgagttggttggaatgtatgtggtgttttgggtttagtttgttgtttagtggatgaatgtatatggttggggtggagttaggttttggaggtttagatgtgttattttgggtgtttttaagaaagataatatatatattgtgtttttaaaatttatgattatttgaatttaatggtagggttttgttttaggatattgtaaaagaagggtttttaatttaaaatttaaatttttttaattttagggtgggtgttggatgggaaagtggagagaaggtgggtagtgggaggaaaaaagaaagggaaggaagggaagtggaaggaaagaggattgtggaggggaggaaaaggagaaaggaatggagatggggtagatggtatttaaatagttaggaatggattggaagggtttgttttggggtttgggtttgaattttgagatttgttttaggatattttttttttttttttagtggtaataaatgtgattgtagaggtgtgttgggatggaagggtgggaaagaattagataagtggaggtggtttagttttgtttaaaggggttgggtttggggtttgtttttatttgtttattttgtgttaagggaggatttgtaatgggtgttttttgtagtggttgggttagttagttgttatgtgggttggtgttttggtttttagttgagatgggtgtgattttttgggtttagagattgtagtatagttgtataggtggttggtgtagttgaggtttttatttattgaggttaatgggggtggggtggggaaggtagggtttagtttaattgagagagttgagtggttttgtttttgggatttggggttggttgtttttggagttgatttgagttttatttagatagtgttgaatatttttattaaaaggttatttaagttttattttattttattttatttttgtttgttttttgggagtggtaggaggggtattgtgtttttgttttgaggtaggggagaggttaaaatttattttaagtaaattttttgttagaaaaatgagattttatattgtattttatttgttgattttttaaatatatttaggttattttaaagtttatttttagttaattaatagattaattttgttttagattgttataaagagtttgtttggaatggtaaatattgttatttgataagattaatagaattttatgggggtaaatatggaagggttgtgagtgtaattgaggtttttgtgttttaatgaggaattttagtggggatttggtggggattggaagtttagtatttatttagggagtgattgagttggaaatttggagaagtttggtgtagatgagatggtgttttttagagttgtattttaagtttttttattttgttgtatattggaagaattggattttaaagattttttttattattttagattttgtagttaatagttatgtttttttttttttgtttgttgaaagttgtgatttaattgttttaagtattttttgataattttgttaaatttattttgaaaatatttatataaagttttaaaataggatgttgtgagtgtaatataaaaataggaaggtattaatggaagtaataattagtgttttgagatagaagtggtttttagtttgtaatttggaaatgttaagagtagtatattagggagaaggtttttaagagtttgattttttgttttgagttttgagtaaagaaagaaatatgttagaattgtattgtttgtttgtagtaatattgtaaagggttttaatggattttaatgtgattgagtaattattttttttagtattaagtttatagtttttaatttttttgtgagaagattaggtaggaagtgggatgagatttaagataattatttaggatttatgttagaatttaaagttttgatttttttggtagataaaaatagagttggttttaaattgtattttttgtttttaaaaaaatgaggtttgaaaggaatttttttagatttatataggtttatagatgtaagttttttttttttttttgtgtttgtaaattggagggagatgtttttgatattttagaatatttgtatttatatatttgtaaattttgttaggaaaggatttaaatagttaaattaaaggtgattatgattaatgttaaagatattatttattgtttttttttttgttgtattattaggtttaaatattttggagttaatgattggttatttaattgagtaatagagtttttgagagtgtaaagattaattaattttgttttttaaagtttggtaattaagttttttttttttggtgagatttaaatatttttgttgatgttatttatggataaatattggtaaatattgtatttaaaatgggatattgttttgtgatggagtagaattttttaagatatatggtttttttgaaagaaagaattaatgattgtagtaaggtatttttttattatttatgtagagaaattagttaggattgataaatatttattgttgggagttatttgttttggtttgagaaaatatgttgattgttatataggtttgtattttattagaaaatataaagtatgtattttttttgatttggaattagaaaagggggattagatatggatgttttggttaagttttattttaattagtgaatttttgttagtttttttttgtagtttagatttggtaaattatatatatataaagtttgtgtgtgtgtgtggggtgtgtgtgtgtgtgtatgtatatagggtttttaaatattgttaagtttttattattgaatgtgttagaggtggttgtattttagaggttagtataaagaatttttgtttaatgtgttagttttgttttttgaaatatatttttgggtagatttattaattataaaaggatataaatgtatatattttttatatttgtatatattttattttatttttttaaggattttaagaggtgtttatgtttataaaatgagattatatattttataataaatatatttgataaattataatttttttattattaaattattgatttgatattatttgaggtatagtggaatgagtattagatttggaattagaaagtttgagttggatttattagttgagaaaattaagtaaagatattatttttggatttttagtgttataatttattaaatgaatatgtagttataaagattaaaagagtaagtattttgaaaaattatataaaaaagggatgataatatattatgttttgggatttatattgatttaattttataattttaataataattgtattatttaagttatgtagtttttattgaatttataaaataaattagagaggggtatattgttttaaaaattgtttagttttattaattagaagatagattatagaaattgattttaatgaagttggatatttagtggaaaggaagaattatttaataaatggttttaggataattgatgggtttatgtaaaataagaattagtttttatttgattttttattttaaaagaaatataagatgaattaaatatgaaatgtagggaataattttttataaaatgataaaagaaaattatgggattaaaaaaaataagttaggaatagagaaatttgttttaagtaaaatataaaatttagtgttattttaggaaatattgataggtttgattaagtaaaaattatataaaagtaaataatatatttggaaaatatttatgatatttgagagataaaaagttaataatttttgatattttatggatttttatgaataattttgaaaagtttatatttattaaaatatgagtaaaaattatgtataggtagtggtagaaagagatatagagttttaaaattatagaaaaaattgtttagttttatttgtaattaaataaatagtaattaaaatattaatgatatgttatattatttttttattaattagaggagtaataaaaaaaaataatttttttttttttttttttttttgagatggagtttgttatttaggttggagtgtagtggtatgattttagtttattgtaatttttgttttttaggtttaagtaatttttttgtgttagtttttttagtagttgggattatgggtatttattattatgtttggttaatttttgtgtttttagtagagtggggttttattatgttggttatggtagttgattttgaatttttgattttaagtgatttatttattttagttttttaaagtgttgggattataggtatgagttattgtgtttggtaaaaatgaaattaaaaagtttgatgtaagtttgtgttggttaggttgtggagaaattgggttttttatatattgttgtatgaaagtaaataggtttttttattttaaaaaataatttggtaattatttttttttgattttttattaaaagtttttaaaagatgtatatattttttgatttagtaattttattttttgatattattatatggatggatattggtattaatattatttaagataaatggataaggatgttttttgtagtattgtttttaagagtaaatatttggaaatagtgtaataggtttattatagggaattatttaaataaaagttgttgtatttatttaatggaaaattatgtagttgttaaaaataatatggaaaaattgtatttgttgatttggaatattttttaaaatatattgtattttaagtgaaaaaattgatagataaaattgagtatatattatatatttaattatgtaaaatgggtgtatatttatttttttaataaatatttattgagtgttttaggtattgtggatataggagtgaataaaatattaaagattgttttgttggaatttttattatggtaggtagagaaaggtaatttttaattatatatgtaaaatggtgatatgtgttaggatgaaaatagagtatgggaaagggaatagagtatagtatgttttaggtagagtaatgagaaaggagtttattaggtagagaatagaggagtgttaaggggtgataatgtgaaaaagtttagttaagtttaggtttaggaatttatatgatgttattatttgtatgaagtaaatttatgaaattttgtatttaaattatgtgatttttttttgttgtataatgattttttttgtgagaaagaattagtgagtaatatgatatgtgatgtttattatatttattttgtagttgaagtattttagaaagttggttgtttagggtatttaattagtagaatggtggataaaattattgtgtttttgtttttaagttattttttgttagttgagtttttttaaaattaagggagaatattaaatatttatttaatagaattttggtttttttttggaggttgtttatttttggtgtgttttttattttttttgtagatattttttatggataggagttttattgattttgttttttatgttttttaggtaattaaatagttttagtattttgtatttggattgtttaatgatttttttttttttttattgattttattggagtagaaggttaaatataggtatttatttttatattttttaggtttttttatgtagatagagttgttattattagtagatggtgtttataagagagatatggaaaagtggaagaatggaaatagggatttggagtggtgttaaaaataaagaaagaggtttttgaaagttttttatttaatatgattaaatatagaagataaaagatgtaatttaatgattaaggatagggatatagttttgagaaaattatagaagtggaatgaatgttttggattttaaagaagagggaatggaaatgtagttttgaggtagttaaagttaataaagttttttgatatatttattgtagaaataaatgattattttttaatttaaggtttgtaaatttaggtgattataggggtgaggtatggagtggaaatgggtaagagattaagtgggggtagtaatggttttgagtatatagatttaaggggagagattgttgtttggttaatgtttatgattagttagttgaaatatagatttagtgttgttagattttttgattttttgaaagaagttagagattttatatttagtgtaaatagtttaatttttaaattgagtaatttatttaaatatatttatgtaatttatttaaatgtatttagagtatgtttgattttttttttgtatttttatttagttttaggggtaattttaaggaaagtgatgtgtatatttgttgtatttatgtagatggaggattatttttttttttttaataaaagatatttttataaggattgagtgtggtataaagagtttgatttttagtatttaaattgagtaggaaatttaaatatagaagatttttttttgggttatatttttggtttttttaaatgagatttgattttttagatattgataaatattatattattgggttatggtaaatttttaagtggattgatttaaaagtgtttaaaagtattttaggtgttaaggaattgttggtatggagttttaaaggtgtttttgtataagaaatagaggtgttgattatgtatttgatttataaatattttttaaggatatattttgaatttggtaatgaagaaatattgtgggaattattaagttgaataaagtattagttttgttttttagaagtttattgttttatagaggagattagatatgtttatagataatttgaagtatatagtaataaattataggatgatttattttaagtataaagtgtatattgttattatagtggtaatttaggttataatttttaaatgtaagagttttaaatattattttttttatttttagtgatatgaaattatgttagaatatttgtagaaagtttgaattagtaattttaataataaatattgagtattgatatattgtatattattgagatttattttatatatattattttattaatttttatgattattttggtaagtattaatttttataattaagtagtgatagaaaatgaggtttagagagatatagtattttatttaaagttatagaatataagtagagaatgtagaatttgtattttgggttatttgatagtggagtttagatttttaaaattaggtttataaagattttttggaaaaaaagaaaaataaaaaatagagaataaatttttttgaagaaaagtaggaaattattatttataagtataattaaagagagatttttaattttttttttttttttttttttgagatggagttttgttttgttgtttaggtgtaattttagtttattgtaatttttattttttgggtttatgttataaagaaagtttttatttgattggtttgatttgattgtttattagaatataggttttttagtagggttaataagttataatagttttagtgatataagataaatataaattaataataaggttaatttagaattattaatatatgttttttattgtgaattattagttggtttatagatggaaaatataagatatataatgtattagtttaaaaaatgttttttagagagtgtttagaattatagaatttaaaaattttgttttgaaaaggtttaatttttattttaaaatatataaagaaattaaatgtaaaaaaattaagagaaaaggttttaattaattaaatgttgtataattttaagttttatttatgtttaagattagttttgtaatttatgattaattttagtattagtttgtttttaatttaggtttgttaaataatatagaattttttttttaatgaagttttttagggttttagttgaaaaatatatattagttaggatgtttttaattgtaaggaataaaaagttatgattttattgggtttaaataataatgatatttataattttatataaaatgaagtttaaaggtatggtttattttaggtttaatttttaaggatttatgttttgtttttgttgatttttttttagttttatttttagaggtattttatttatttatggatgtaaaatttttataatagttttagtagaaagattttagtatgataatgtttagggaagaaaattgattatttttttttttgttttttttttaggatgaatttattttttttagggattttttattggaggaagagatttttttatattttattggttaaaattatattatatattgttttaaatttaattattggaaaagggaatggtatttttataattgatttaggatattaggattattttttgggttggggtttgatttaggattttttaaagtatgtgattgagggtaggtattagaatggaattagagttgtgttagaaaggagaaatgtatggttattatagaatagttttaaatgttattgaggagggtataattgtaaaaattaaataattttttgttatttttttgaagttggtattttgatttttagatggttttttaatataggttttttttttttttattattatagttgttttgaaatttgagttggaagggaatattttgagatttagattgttaaatgttttttttaaagttatgtaataaattaaatggtaaagttagggtagttttttgatttagtatagggtatttttttttattttttatttttgagattttagaattgttggtattgttttaaaatttatggtaagaattggttatttttgtaattaatatttttttataatatatttgttttgtttgtttagttagttagaaattatatggagtttgtgttttaaaaagtttgttgaagtttttattttttgttttggtattatgtgtatgaattattaattggtttttttttattttatatttgatgaagatgttttttttttaatatttttttttattgttttttatttttttttgttttatttatgattagttgtttgtttttaaatagattttgtggttatttatttttttttgtgttagtttttatttattagttatttgaattgtggtttttattgttttttatatagtttatttatttgtggttgttatatatatttatattgttatatgtttttaaattgtattttggaatgattttggtaatggttgtattggatgagatttaaattaataattaaagtattgagatagtttttgttattataagtttatttttgtttttatagtttaagaggagttattttttttatttttattatttaatgtttaatattatttttattatatataatgtataaaaagtatgtgatttatgatttattttaaatttgaatgtttgtgatttattttgtgtttttttttatttttagg

SEQ ID NO: 302 - DNA, 16579 bp, Artificial Sequence
  chemically treated genomic DNA (Homo sapiens)
tttagaaatgaagaaaaatataaagtaaattataagtatttaggtttaaagtgggttataaattatatgttttttgtgtattgtatgtaataagggtagtattaagtattaagtaataagagtagaagaagtagttttttttggattataaaaataggagtaaatttgtaatagtagaagttattttaatgttttaattattagtttgaattttatttaatgtagttattattaaaattattttagaatatagtttgggaatatataataatgtggatgtgtgtgataattataagtgagtaggttgtatgaagaataatagagattatagtttaagtaattagtggataggagttggtataaaaagaaatgggtgattataaagtttatttagaaatagatagttgattataaatagagtaagagaagatggggagtaatagagaaagatgttgaaagaaaggtatttttattaagtgtaaggtgagaaggaattaattggtggtttatgtatataatattaaaatagagaataaggattttggtaggttttttaaagtatagattttatgtagtttttagttggttaagtaaataaaataaatgtattataaggaggtgttaattataaaagtgattagtttttgttatgaattttaaagtagtattaatagttttaaagttttaagagtaaagaatgaaagaaaatattttgtattgagttaagaaattgttttggttttgttatttaatttattgtatgattttggaaaagatatttaataatttgggttttagaatgtttttttttagtttaaattttaaggtagttataatgatgaggaggagaagaatttgtgttggggaattatttagaaattaaagtgttaattttaaaagaatggtaaaagattatttggtttttatagttgtgttttttttggtagtatttagaattattttataatagttatgtgttttttttttttaatataattttggttttattttagtgtttatttttagttatatattttggagaattttgggttaaattttagtttaagggatgattttgatattttaagttaattatagaggtattatttttttttttaatgattggatttggaatagtatataatatagttttggttagtgagatgtgaggggatttttttttttagtgaagggtttttgggaaagatagatttattttgagaagagaataaaggaagaggtggttagtttttttttttggatattattatgttggaatttttttgttggaattgttgtagggattttgtatttatgagtaagtgagatatttttggaaatgaagttgagaaagaattagtaaaggtaaggtgtaagtttttaaggattagatttagagtggattatgtttttgaattttattttatatgagattataaatgttattattgtttaaatttaataaaattgtgattttttgttttttatagttgaaagtattttaattggtatatattttttagttgggattttgaaaaattttattggaaaagaaattttatattatttagtaaatttagattgaaaataagttaatgttgaaattagttataaattataaaattgattttgaatataaatagggtttggagttgtatagtatttaattaattaagatttttttttttaatttttttgtatttgatttttttatatattttgaaataagaattagatttttttaaaataaaatttttaaattttataattttagatattttttgaagagtattttttaagttaatatattatatattttatattttttatttatagattaattgataatttataatgaaaaatatatgttgataattttaaattaattttattattagtttgtatttattttatattattagaattgttatgatttgttaattttattggaaagtttatgttttagtagataattaggttggattaattaaatagaaattttttttatggtatgaatttgggaggtggaggttgtagtgagttgagattgtgtttgggtgatagagtgagattttgttttaaaaaaaaaaaaaaaaaagaaattaaagatttttttttaattatatttataaataataattttttatttttttttaggaaaatttgttttttattttttatttttttttttttttaggaaatttttataagtttaattttaaaagtttgggttttattgttaaatagtttagaatgtaagttttgtattttttatttatattttgtgattttgggtaaaatattatatttttttaaattttattttttgttattatttagttgtgaaaattagtatttattgaagtgattataggaattgataaaataatgtatataaaataaattttagtgatatataatatattagtatttaatatttattattaaaattattaatttagattttttgtagatgttttaatatagttttatattattaagagtaaaaagaatagtatttggggtttttatatttgaaaattataatttaggttattattatagtagtaatatatattttatgtttggaataaattattttataatttattgttatgtattttaaattatttgtaaatatgtttaattttttttgtagaatagtaggtttttggaaggtagagttagtattttatttaatttaataatttttataatatttttttattgttaggtttagggtatatttttgaggaatgtttgtagattaaatatatgattaatgtttttattttttatgtagaaatatttttgaaattttgtgttaataattttttaatatttgaaatatttttgaatatttttgaattagtttatttgaagatttattatgatttaataatatgatgtttgttaatatttagagagttaaattttatttaaaaaaattaaaggtgtgatttaggaaaggattttttgtatttgagttttttatttaatttaaatattaaaaattgaattttttgtgttatatttaatttttataaaagtgttttttgttggggagaggagaatggttttttatttatataggtataataagtatatgtattattttttttaagattatttttaagattaggtaagaatataaggaggagattagatatgttttaaatatatttgaataagttgtataaatatgtttgaataagttatttaatttaaaaattagattgtttatattaaatataaaatttttaattttttttaaaaaattagaaggtttagtaatattaagtttatattttagttggttgattatgagtattaattaagtagtagtttttttttttaagtttgtgtgtttaaggttattattgtttttatttagttttttatttatttttattttatgttttgtttttgtagttatttaagtttgtaaattttgaattaaaagatgattatttatttttatagtaaatatattagagggttttattgattttagttgttttagaattgtatttttatttttttttttttggagtttaagatgtttattttatttttgtaatttttttaaggttatgtttttatttttggttattaagttatattttttgttttttatgtttgattatattaaatggaaagtttttagaagtttttttttttgtttttagtattattttaaatttttatttttatttttttatttttttatgttttttttataagtattgtttattagtgataataattttgtttgtatggaaagatttgagagatatgagagtgaatgtttatatttagttttttattttagtgaagttaatgagaagggaagaaagttattgaataatttaggtatagggtattgagattgtttaattgtttgggagatataaaagataaggttaatggaatttttatttatgagaaatgtttgtagggaggataagggatatattagggatgggtagtttttgagagaaagttaagattttattaaatagatatttagtatttttttttgattttggggaagtttagttgataaggggtgatttaaggatagagatatggtggttttgtttattattttgttaattaggtattttagataattaattttttaggatattttagttataaagtggatgtaatgagtattatatattatattgtttattggtttttttttatagaaagaattattgtatagtagagagaaattatgtgatttaggtgtgaaattttatgaatttattttatataagtaatagtattatgtgaatttttgaatttggatttggttaagtttttttatattgttgttttttagtatttttttgttttttgtttggtgaattttttttttattattttatttaagatatattgtattttatttttttttttatgttttatttttattttagtatatattattattttgtatatgtgattgggaattgtttttttttatttattatagtaaaagttttaatagagtagtttttgatgttttgtttatttttgtatttataatgtttagaatatttagtaaatatttgttaaaagaatgaatatatatttattttatataattagatgtataatatatatttagttttatttattaatttttttatttagaatataatatattttggagaatgttttaaattagtaaatataatttttttatgttatttttgatagttgtatagttttttattaggtggatatagtaatttttatttaaatggttttttatgatgagtttgttatattgtttttagatatttgtttttagaagtaatgttgtaaagaatatttttgtttatttgttttgggtgatattggtattaatatttatttatataataatgttgagaagtggaattgttgaattaaagagtatatatattttttaaaaatttttgataaagaattaaaaaaaagtgattgttaaattattttttgaagtagaggaatttatttatttttatataatagtatatgagagatttagtttttttataatttggttaatataaatttgtattaaattttttaattttatttttgttaggtatagtggtttatgtttgtaattttagtattttgggaggttgaggtgggtgaattatttgaggttaggagtttaagattaattgttatggttaatatggtgaaattttattttattaaaaatatgaaaattagttaagtatggtggtgggtgtttataattttagttattagggaggttgatataggagaattgtttgaatttggaaggtggaggttgtagtgagttgagattgtgttattgtattttaatttgagtaatagattttattttaaaaaaaaaaaaaaagaaaaaaattatttttttttgttatttttttgattggtgaaaaaatggtgtagtatattattggtgttttaattattatttatttaattatagatgaggttgagtgattttttttataattttaaaattttatgtttttttttgttattatttgtatataatttttgtttatattttgatagatgtggattttttaaagttatttataaaagtttatggaatattaagagttattagttttttgttttttaaatgttgtagatgttttttaaatatattatttgtttttgtgtaatttttatttagttagatttattagtattttttagaatggtattgggttttatgttttgtttagaataggtttttttatttttaatttattttttttaattttatgatttttttttattattttgtaaaaagttattttttatattttatatttgatttattttatattttttttaggatgagaaattaggtagagattgatttttattttgtatggatttattaattgttttgaaattatttattgaataattttttttttttattgaatgtttaattttattggagttaatttttgtaatttgttttttgattaatgaaattaaataatttttaaaataatatgtttttttttgatttattttatagatttagtagaaattatatggtttgggtaatgtagttattattaaaattatagaattagattaatatgaattttaagatataatatattattattttttttttgtatagttttttaaagtatttatttttttgatttttataattgtatatttatttaatagattatgatattaaaggtttaaaagtaatatttttgtttggtttttttagttagtgagtttaatttaaattttttgattttaagtttagtgtttattttattatattttaagtaatattaaattaataatttaataataaaaagattataatttattaaatatgtttattgtaaaatatgtaattttattttatagatataaatattttttaaaatttttagaagaatgaggtaggatgtatatagatgtggaaagtatatatatttgtatttttttatagttggtaaatttatttagaggtgtgttttaggaaatagaattgatatattaaataaagattttttgtattgatttttgaaatataattatttttaatatatttaatggtaagaatttagtagtgtttaaaaattttgtatatatatatatatatatgtattttatatatatatatagattttatatatatgtaatttattaagtttaggttataagaggaaattggtaaaaatttattaattgaaatggagtttggttaagatatttatatttaattttttttttttgattttaaattagggagagtatatgttttgtgttttttggtaaaatatagatttatgtaataattagtatatttttttagattagagtaagtaatttttaataatgagtgtttgttagttttaattggtttttttatgtgggtggtgaaaaaatattttattatagttattaatttttttttttaaaagaattatgtgttttgagaagttttgttttattatagggtaatattttattttaaatatagtgtttattgatgtttgtttatgaatgatgttaataaaaatgtttaaattttattaggaaaggagggtttagttgttagattttgggagatagagttagttgatttttgtgtttttaaaggttttgttatttaattaagtgattaattattaattttaaagtatttaagtttaataatataataaaagagagaataatgggtagtatttttaatattaattatggttatttttggtttagttgtttaggtttttttttagtagaatttataagtgtatagatataggtattttggaatattaaaggtatttttttttagtttgtaaatatagggaaaaagaagaaatttatatttgtaaatttatgtaaatttagggggattttttttaaattttgtttttttgaaagtaggaaatataatttaaaattaattttgtttttatttattaaaagaattaaaattttgaattttgatataaattttaaatgattgttttgaattttattttgttttttatttaatttttttataagaagattaaggattgtggatttggtgttggaggaagtaattgtttaattatattggaatttattggaattttttataatattattgtgggtagataatataattttaatatatttttttttttatttagagtttagaataagaagttagatttttggagattttttttttgatgtattgtttttaatatttttaagttataaattgggaattgtttttattttagaatattaattgttgtttttattggtatttttttatttttatattatatttataatattttattttaggattttatgtgaatatttttaggatgggtttggtgaaattgttaagaagtgtttaaaataattaggttatagtttttagtagataaaaagaaaaagatgtggttgttagttatagaatttgaggtgatggaaaagatttttaaaatttagtttttttaatatgtagtaaaatgggaggatttaaaatgtagttttaagaagtattgttttgtttgtattaagtttttttaggtttttagtttagttattttttaaataggtgttgagtttttagtttttgttaggtttttgttaaggttttttattgaggtataggaattttagttatatttgtagtttttttatgtttgtttttatgaaattttattagttttgttgaatggtagtatttgttattttaggtgaattttttatgatagtttggaatgaaattaatttgttaattgattaagaatgggttttagagtgatttgaatgtatttaaaaagttaataaatggaatatggtataaagttttatttttttgataaaaagtttgtttggagtaaattttaattttttttttgttttaaaataaaagtatgatgttttttttattatttttaagaagtaagtaaaaataaaataaaataaaataaaatttaaatagttttttaataagagtgtttagtgttgtttggatggaatttgggttagttttagaagtagttggttttgaattttgggggtgaggttatttggtttttttggttaagttgggttttgttttttttgttttgtttttattggttttggtgggtgggggttttggttgtgttggttgtttgtgtggttgtattgtagtttttgagtttaggaagttatatttgttttggttgggagttgaagtgttaatttatgtggtggttggttaatttagttgttgtggggagtgtttgttgtgggtttttttttggtgtgaggtgagtgagtgggggtgggttttagatttagtttttttgggtggggttggattatttttgtttgtttagtttttttttatttttttattttggtatgtttttgtagttatatttgttgttgttgggaaagggaaaagagtattttaaaatgagttttgaaatttagatttaaattttgaaatgaatttttttggtttgtttttggttgtttgaatgttatttgttttatttttgtttttttttttttttttttttttttatggttttttttttttttatttttttttttttttttttttttttttttttattgtttgttttttttttatttttttgtttgatgtttgttttgaagttgaggaagtttaagttttggattaggagttttttttttgtaatattttggggtggggttttattgttgggtttaagtggttatgggttttgagagtatggtatgtgtattattttttttaaagatgtttagggtggtgtgtttagatttttgaaatttggttttattttggttatgtgtgtttgtttattaagtggtgaattggatttagggtgttgtgtgtgttttagttgatttgtgagaaggtatttttgtattttgtatagattaagatttttttttagggttttttaaatttttagatgtatgttgtagattgtggagtgtaaaatgaatgatttaagggaaaattagggttttttatttttgaatataaggttgtgaaagatgtatgtttggtttggggggtttgtttttttttgtttgtgtgggatttttttattagggggtgtttatatttgttgtaaaatttttaatttttagatatttaggttttgtaagttttgtgagttgaattgggggtagatttgaaggagtgtattgttttttttgtttttttttttttgttgttttggagtatgggaaaggtagggattttatattagttatttatttgttagttgtgggggaggggatgtagaagttagagagagagaatagaggttgggagaggggaagggaggtagagaagatggagatagagggagatataaagatgaggaatgtgatttagagagattttgttgtgggtgtgtgtgtggtaggataattttttaggtgttgtgtagatttttttttttttttgtagtattttttagggatatgtaggatttgttgagatgtagttggattggagagtaaatagtttaggttatgatattatttttttattttgtttttttttgtttaatatttagattgttttatgtttagtgatatagattgtgggttagaataatttggatgttttaggtttgtatgtattagggatgttgttttatagtgtttatgtttttgtaggatggtggggtgttttagttgaggatgttttttggggtttttggtatatgtgtgtgttgttgttgttagatttgttagtaaagttgtttaattagagtggagaattaggagagggtggggaatatgtaaggaaatggaggatttttgtagtttgggtgagaggattgatttagaggtttttgatttgggtttttgagttatttttgtttgtagtgtgttttgggtgttggtttgtttgttgagatgggagtgatagattttattttattttttagggtgagaaaaattgttgtatatttttgttgatttagaataggttttttttgtttaggggttttttagatttttgtggggttttaataattttattttttattttttgttttttttttgttggtttttttgtattgtgtgtaggataaaagaatttaggggtgttgggagagaattgtgatagtttttaagttgttaaagagatatggtggggattttgtattttttttggttggatttttttttagattgtttgtggtttgaaggggttaggtttgtgtaaggttttaggttgtttgggtgttgggttgtattgttaggagttgtttgggagtggttttttaggaatattaggtattgattatatattaggggttgggaaattaggtggtttgtattaaggtggttttggggatttgtttgtggtaagttttggtagtttttatttaaatttttgttttgagtgtgttaagaataataataataaaaaaattaaagtgttaaaggttttttttttttttttagtttaagaatttattatttttttatgatttttttataatttattttttttttttttttaattttgttagttattttatttttattttattttgggttttttttgtttgaattttttttaatattaaggtttttttgtatgtttttttttaaaagtttttatgaaagttatttgtattttttaagtgtttatatttttttaattttgttttatagttttttgttttaattaaagttttttattaattgttttttttttttaagtttgtgggtttttttttataagttttttgtttttgttttttaaggggggaataaaagaaatgtgattattttggaaggtggtttattgtagtttggggggaaaatttattgtagtgttgtgtgattgggtttggtgttgtttaggtgggttatataggaagtgtggtggtttggggaaggatgtggagggtgtgggatggtgttggaagatgtgggaggatgtggggttggttgaagattttggttttagtttttgtttataatatttaatgtttttggttgttgtgtttgtatgtttggagtttttttttagaaaggtttggggtagtttgtttgtaagtttaaatgtgggttgtgatatttattattattatattattgtattgttagagttgaggaggagatttagtgagaagaaggaggagggagaggaggagggtttatttataggttttaaaagtgttttgtagttttagttatttttaagagtttaggtttggaaagtaggtggaggggtggaaaggtagttttttgtgtttgtggtagggattgtttgtttttttttttaggtatttttattttttggtgtttttttttgataagaagtattaattggtttggggatagtagtgttttttatttagggatttatttagtaatattgttttgtttgtggaaattattgtttttttattttttttttatttttatttttttgttttttgtgtagttagttttgggttaggggaaaggagtttttaggtttttagggggtaggttagtaatagataattgagtatgattatttttttttgggagtatataaaattgtaaaattagtaaagaatttggttatagtgtgtttatgtgtttatagagtttgtttgttttattaaagggaagtgttaggtttaaggtttttgttaatttgaaagagatattgagaaaatgagattttttggggatttagagggaaagtgtaagaattttttattgtatttttagggaattgtttaatggggagtttggttttaaaagattttggtaataaaaggttggataggaaatttttttaggtaaattttttgttggatttaaagagaatattttttttttgttataaatttttttttatataagtttagattttgttttttttgtttttttttttttttagtttttttaagtatttttgagtagaatatttgataatttttttgagtaatagggattttttggaagtattaattattttttatgttttttggaaataagattataattttttatgtgtatatgtgattttttttttttagttaggtttattttattgtgtaaatagtattaatatatggaagagttttttgtattgtgttataaaagatttttaataggattttatagagaaaagggttaaatagttgatataaaggatttttgtttttttagaaaagagggattttggattttttttttttttgaagttaagtatgagtttatataataggaataaaataaatttaaggtgtatattagtataatattagggatattagaatggatggtaaatttttttttttatataaatatgaaagtatttttataatttttttttttgaagtttttatttagaaaattatattaaatataggattttaaaatagtagtgattaaagatgaaagttaatttttttttttaatttttttgattagtttggtttaaatttatgttttaaaatttttagtaatttagatttttgtatatgtgtatttataagattttttttatattttgtaatttgtaggtatttagtatggttattgattttaagtgataaataggtagaagatttgttaggataattttagtttttattatgtgtattttttattttttttgttatttattagttttttgtagtaatataattgttagttatattatttggaaattaatgtgtttttgtagtgaattatttatttttagtaaatttattgtattattattttaaatattgaaatttgattttattagatgtttagaatgatagttatagagtagaattagattttaatttttatgtataatatgtaaataaattaaggtgtagaaagttattgttttaaagttatataattaatagtttagtggtttttttagtgttaattatagtaattttagatttaagattgtttgatttaggaatggagagaaataaaataaaatgaatgtttattgaaatatatattttagatattaagatagatttttttgtgaaatattttaagatgtggatttgtatttttatttttaaatttgagtaaatttagttgagttttaaagagtttaagtaatttgtttaaggttattttgtaagtgatagatttgttagtttgaaaagtttattattttttatttttttgtttttttatgatatagttaagtaaaattttttaataaaggagaattagattagaaataagtaattaatagtagattaatgtttatttttagggaaatgttaatagttaatatttattataaataatgttatttgtatataatggaatatgattgaaagtgatgggttagatattttttatattttgagatgtttttatttatgttgttaaatttgattttttaattttttaaaatttttagttttttttaatgttaatagattttataatatttgattaaatatttttataggataaaggtatttttttagggttgatttaaggaattagaatatgtataatgttgaaaagttttaaattgtttgtttttttttttttttgatttgtaatattattatttagaaaattaaatatttttttaggttattagataattaaaatgaaattatattttatggatattttttttttatttttagggtagatttttttttttagttgtttaaaatggagaatggataaaaaagaaaaaggaaaatatattagttatatttagaatagagtttatagttgtattattatttttatgtaattgtttttaatgatttttttttattaagagaaagaaaatgagagagtatttatttttgattttttaatgtttgataaaattattagaagtttttgaatgggaaaatatatattttttaggttttataattaaaattgtatttatttgtttattatatttaagtatgaattaaatagtaattaaaatattattttgtgagtttttttttaaattatatttttgtattggggatattttttgtgaaaattttaagattttaggtataaataaagtaagatttttatttataatgtttgtgtttaaaagaaattataagttagaagttatgtgttttgtttttttgttttgattttgtttttgggaatttggttgagtttaggggtagtaagttaatgatttggagaggaaaggtgtagatggtagatgtgtttttagggaattttattatttttatttaaatttttttttgaggttttttaggattatattttagatttttttttttttattgattaggtgaagtgtttttagatatggtattatttattgttgttttagggatgataagattttagttttatttaaatttagaaagagtttagttttaattttttgatttgattggttttaggtataattaagtaaattatttttattggatgatatagtaatgttatagattaaaaatgtatttttaatttttaaagattttggaaaaaggaagtttattttttaagattgtgttataattttttttttaaataaaatattgtaaattagggatagatattttatttagtattttgaattttttttggttttttaggaaaggtagaaatataaggtttttattgttttttttttatttttaaaaaagaaattttgtaaaaggtaaagtgatggtggtaattttattgtgttttaatttgaagtatataaattgttttgataaattaaatatagataaatttttttagaaagttataaaatattagattttttttagatattagatattgagtttttgttttttaatttttaaattaaaatgttatagtaaaatatttgttttaataaattttttttttttttgtgttgtaaatgttttgtttatggttgagtagatttttttagaatttaattgaaagattatttatattatgatagaattatgtaagttaaagttaagttttaatatggagtgatgggagaggttgggttgttgagaggagatgattttattagtgagaagagaggttttttgagttggtttttaaggtagttaaatggtttagtatatttgtatttattttgggaggttgtttggagtagagtattaaaaatgttattttttttataaagaaaaagatgaaggtataaagaatatagtttaattaaattgaattaaagattgtattatttttattttttttttagttatttttttaaagttttttttttttttttttatagtttgaaaaatataggttatttttataaagtatttgtttgattgaagtaagataaattgaagagtttggtttttgaatataaggaagtggtagagattttagaattaatgaggtagggtggaatataatgtagaaggttttttaagaggtaaaatttttgtagttgttgtttatttttagtgattatttgtttttatttatttaattagattatagtgggattgagataaggagtataatgaaagttgttgtattgatggtgtaaaaagatatatggtattattaatgtttttgtggtgagtaaaggtagaatgtaagatagaaaataaggaaatttttgtgttgtaagaaaagtgtttagtatgggtattaattggtatgtagaagtagtaagtatatattttatttttattttattgataaaaagaattgtaggattaatgtttgtttttattaaaatatgagaaattatattttaattttataaattaaaggttaaatatttgttgtaataattttaaaaaaaagagaagatttgtaagatttagtaaatatttattataaatagattgtttttaattttttatatttttttttaatttaataaaagtttattgagtagtttttatgtgtattgttttagatagtaggtattatttaaaaaagtaataattattttttatttttaaggagtttataatgtttttagaaagaaattaatttattggagtagttaaagttataattgatttataaaatgattagtgaatttagaggaaaattatatataaatatttttgtttttattggttggtttagttagatattattttaaaaaata

SEQ ID NO: 303 - DNA, 6090 bp, Artificial Sequence
  chemically treated genomic DNA (Homo sapiens)
tagagatggaatgtttaaattaggataatttagggaggtgtgggagaggtgtagggggattataagggatggagtaggaatttaaggtagtaatagtagagttggtattaattttaggtttaaaaagataaaggagagagagtggttattaaaatttagaaagagaaaatttggtaaaagatgggatttggtgaggagtagtaatttgtgtttggttgtggattgtggtaattttgtagggaggagagtagaggaatgattattttggttttatttttttttttttttttttattttatgttaggtgttttattggttaaatttattagtaattagaggataaggaatgtattaaaataattttatggtttagagagtagattagatgtagagtgataaatggattatatttagtataattgtaggtttatttgttgatttgttttttttattagattgagttatttgaggatagagaatgttttttttatatttgtatttttaatatttggtggatattagatatttaagaaatgtttatggatgggattagagaagatggtaaattgggtattagatggaggtttgtgttttttgagtttgttgtatgttttttggtgaatttaaggtaaaatgagaaatagaatgagttttgtatttttgtttggtaaaagaaaatatgatttggtgagaagaaatgaatatttttagtatttagtgttgggaggaattggaattagttatgtgattgtttttattagaggtttttaattgtgtaatggatagaatttttaatggtgaaattataatgtagaaatatttttttttttttttttttttttttttttgagatggagttttgttttgttatttaggttggagtgtagtggtattattttggtttattgtaagttttgttttttgggtttattttatttttttgttttagttttttaagtagttgggattataggtatttgttattatatttggttaattttttgtatttttagtagaaatggggttttattgtgttagttaggatgtttttgattttttgattttgtgatttgtttgttttggttttttaaagtgggaaatatttttaaaaatattagtttttgataaaattaaagttatgttataaaaaagtaattaaaaggtggaaatgagataatatggtttattttgagttgagaatattttgttagaaaatgattgttttagattttaaatttgattttttatataaatttttagtgtaattttttttgtattatttttttttttattagttaaaagatggaaaggataaattgaggaatttatgttggaggagtatggatttattagatggtagaaatttgggtttttgaatgattattgtggagttgatttttgtttatgttttgtaaatttttgtgttgagagtaagtaatatatttttaatgtgttaaatttttgggatttgttgggttttatagtaatggttattttattttaatatgattgtaaaataatgttttaaaatttatagttgggtttgtttaaaatattattgttattattattataatttatagtttatattataattatttttatagaagttttttttaattggtattttataatttgtggttttttatattgttgttttttatgtgtgagatgtttttttgagttttttttgttagggatatgatagaaaataaaatatttaatattttggtgtattttataatgtataaagttttgttttatgtattatttttttagatttttttaataaatttaaggaatatgtaagggtttataattatttttattttataggtgatgaaattgagatgtttatatgtaaagtggaaataattatttatttatttatttatttattaaataaaaattttgttaatttatttaaagattaattgagagaattattttatttgtttggaatttggtatgtgttaagagaaaagtttttttaatttttttttttaagaagataatttattgttatataataaattattttgaaataatgatttaaaatattaaaagttattgattttgtttatagaatttgaattggaagatataaataattgggagtgagggtggggttggatagttggtttttttgggtattttttgttttttttgtggttttgttatatgtttttatatggtagttttagggtaattatgatagttgaaggttttagagtgggtggagggggagagggagggagggaaagagagagagagagagagagagagaaagagaagtaagtaggtagaagttttaatgttttatgatttaattttggaaataaattatattgtgttattgttattatttttttttagaagtaagtagatagggttggtgaatatttattgagaggggaattagattttattttttgattgggggagtgttaaagaatttgtgaatatgtttttaaatgattatattttttttttttaaaatgtttgtttaaattggtgtatataaaaagtttgggggttagtgatttatttaaggttattaagttgttaaatggttttattaatattagatttaattttgtgattttaaattttatgtttttttttattattttagataatttttggtgaatattattgtttattagggtagttaagatattttagttgttaaatagatttagtttttttaattgttttggataatatattttttattttgtagaaaataaatattatttatatggtagttatttataaatattttttaagtttattttaaatatttgtgttttaaatttttttttttaatagatgtatttatttgtatttttttagatgaattattttttttttgttgttgttgttatttttgattgtattttttattttttaagatttttttgtattattaagtttattgtttaagttaatattattttttaatttggggatttttttttgatttttgtgtgttttttttgtgggttattaatgtaatgttatttaagattaggatttggttgggtgtagtggtttatgtttgtaattttagtattgtgggaggttgagttgggaggattatttgaggttaggagtttaagattagtttgattaatatggtgaaattatgtttttattaaaaatataaaattagttgggtatagttatatgtttgtaattttagttattgggtagtttgaggtaggagaattgtttgaatttgggaggtggaggtggagtttgtagtgagttaagattttataattgtattttagtttgggttataagagtgaaaatttgttttaaaaaaaaaaaaaagattaggatttgatataaggtttgaggggtatttttttgttttgttttgttttgtttttaagaggttaaaatttttatagttgaaaatttttgttgaattatagagatttgaattaatttagtttagaaagtttggggatttgaataatggtatggattggaaatttttttatttgttagtttttattattttaggtagtaaaatagatttttttttaggagttttttattgtttggggttttttagtagtgggatgtggggaattaatttttttttgtttttatttaaatattaggtgggagtaaggggtgggaagtagagaaagtggatagaggtttttagtggatatgggatttttgtgtagattagtatagtttttagaaattttatgtaagtaatataggtattgttatattttttagtggttattttttaaaaagtaaataggtgaggttgggtgtggttgttatgtttgtaattttagtattttgggaggtttaggtgggtggattatgaggttaagagatggagattattttggttgatatggtgaaattttgtttttattaaaaatataaaaattagttgggtatggtgatgtgtgattgtagttttagttattggggaggttgaggtaggagaattatttgaattttggaggtggaggttgttatgttttattatattttagtttggtgatagagtgagattttgttttaaaaaaaagaaagtaaataggtgaaattaattttaataatatattttgtttaatttaatgtatttaaaatattattatttgaaagtgtaatgaatataaaaatatttatgagatattttttatttttatatttatattgttttggattttaatgtgtattttatatttatagtataattaatttgggattagttatattttagtttaataatagttaatagtatatgggatagtgtaaataaattttgtgtttttgttgtttttttgggttttggagattttaattttttttttagattgtaaatttttttgtttttaagttttggttttaatattagtttggtagaggaatttagtttaatgaggtatgttttttttttgttattttttattttattaatttgttttgtggtaaatgtaggattgattttttaaaattattttattaattagtttatatatttattatttatttgttttattagaatgtaggtttttggaaggtagggatttaaaaaaatttgttttgttttatgtgatttttttatattaagtattgtgtttggtataagttgggattttagtatatattttgggatggaagaattgtgtttttttagaatttagttagagggtagtttagtaatgtgttataggtggggtgtttgtgttttgggtggatgtattggttttttggttggtgtgggtgtggggtgagtgggtgtgtgtggggtgtgtgtggtagagtgtgttagtgagtttggagtgtggagttgggaggagtagtgagtgttgtgtagaatttgtagtgttggtttggtagggtagtttggaggtgggtgggttgtgttgttagtttgtttgtagggtttttattggttgtttgttggttgttttttgtttaaaaggtggtaaggagttgagaggttgttttggagtgtgaggaggatagttggattgagttaatgttggggattttgttttttttgtggaggggatttggtaatttgtagtggtagggtttggggttggtgtttgggagggatttgtgttttttatttattttttagttgtgtttttgttgtgttttggttagtttttggtgttggtgtttatggttggtttttgatagtgttttggagggattgggggagtttttaggtgtttgggtgagtagttaggtgtggttttttggtttttttgatttttggtgttagtttttgtttttttagttagggtgtggtggggtttgtttgggtagtgttttgagtaattgggaaggttaaggtggagggaaatttggttttggggagaagtgtgattgtagttgggaggtttttttagttttgtgggttgggtgagaataggtggtgttggtttgattaggtgttttgtgttggggtgtgaggatttggagtgaattgttgtgttttggtgggttgttttttttttttttttgtttttttgggtggttgtatgttgggttggttgggtaatggagagggagttgttaggaatgtggttttggggattgttttgtttggggaaggggagagggtggttatggtgttaggagaggtgtgggagttgagaggtggtgtgggggtgttattgttgttgtaggttggagagagattgtttttagtgaggtgtgtattgtttgggtgagggttttatttttttgtggtgtttttggaggtgggaaagttgggtgggtatgtgtgtagagaaaggggaggtggggaggttagttatttttggagttggttttgattttaatagattgtttagtgtttggggatgttgattttggggtgttgtggtgtttggttttatgtgtgtgtggggttgaggggttgggggtgtttttggttgtttagttttaataaagggtgtttttttttattttgtgaggaggggtagttttggagatttggtttttagtgagtggggttttagtgttggggaggtttatttttttttggggttgttattttattattattattgttttttttttttttttaaaagg

SEQ ID NO: 304 - DNA, 6090 bp, Artificial Sequence
  chemically treated genomic DNA (Homo sapiens)
ttttttgaagaaaaaaaaaaggtaataataatagtaaaatggtaattttaaaaggaagtagatttttttggtgttaagattttgtttgttgaagattgggtttttggagttgtttttttttgtggggtggagaggagtattttttgttaaagttgggtggttagggatgtttttgattttttagttttgtgtgtgtgtggggttgggtattatggtattttgaggttggtgtttttaaatgttgggtggtttgttgggattagaattggttttggaagtgattggtttttttgttttttttttttttgtatatatgtttatttagtttttttatttttagggatgttgtggaagaatgaagtttttgtttagatggtatgtgttttattgggagtaatttttttttagtttgtggtaatggtggtatttttgtgttattttttggtttttgtgttttttttaatattgtggttattttttttttttttttgagtgaggtagtttttagagttatatttttggtgattttttttttgttatttggttgatttggtgtgtggttgtttgggggagtaagggagggaagggagtggtttattgaggtgtagtagtttgttttagatttttgtgttttgatataaagtgtttggttgggttggtgttatttgtttttatttggtttgtggggttggggaagttttttggttgtgattgtatttttttttgaagttaagtttttttttgttttggtttttttagttgtttgaggtattgtttggataaattttattgtgttttggttgggaaagtaaaagttggtgttgggggttggggggattggggagttgtgtttggttatttatttgggtgtttgggagtttttttggtttttttggagtgttgttggaggttgattataggtgttagtgttggagattagttggggtgtggtgggaatatagttagggagtgagtggggggtgtagattttttttaggtgttggttttagattttgttgttgtgagttgttgagttttttttgtggagggaataaagtttttggtgttggtttggtttggttgttttttttatattttgaagtagttttttggttttttgttgttttttgggtggagggtggttggtaggtggttaatggggattttgtaagtgggttggtggtgtggtttatttatttttgagttgttttgttaggttggtgttgtgggttttgtgtggtgtttgttgttttttttagttttgtgttttgggtttgttggtgtgttttattgtgtatattttgtatatatttatttgttttatatttatgttggttggggagttagtgtgtttgtttggaatgtgggtgttttatttgtgatatattgttaagttgttttttgattgggttttagggaaatatggtttttttgttttgagatgtgtattgggattttagtttgtgttgggtatggtgtttggtatgggaaaattatatagaataaaatagatttttttaaatttttgttttttggaaatttgtattttggtgggatagatagataataaatatgtaagttaattaataaggtaattttggaggattagttttatgtttattatgaaataggttaatggaatagagaatggtaggaagggagtgtattttattagattgggtttttttgttggattggtgttggagttgaggtttgaaggtaagaaggtttgtaatttgaagaaagggttgaggtttttgagatttaaagaagtaatagagatgtagagtttatttgtgttattttatatgttattggttattgttgagttgaaatgtagttagttttaaattaattgtgttgtaagtgtaaaatatatattagagtttaagatagtatggatatgagaatgaaaaatattttatgaatatttttatatttattatatttttaaatgatagtattttggatatgttgggttaaataaaatatattattaaaattaattttatttgtttatttttttttttttgagatggagttttattttgttgttaggttggagtgtagtggagtgtggtaatttttatttttagggtttaagtgatttttttgttttggtttttttagtagttaggattatagttgtgtgttattatgtttagttaatttttgtatttttagtagagatggggttttattgtgttgattaggatggtttttattttttgattttgtgatttgtttgtttgggttttttaaagtgttgggattataggtgtgatgattgtgtttggttttatttgtttattttttaaaaggtggttattagaaaatataatagtatttatgttgtttgtatgagatttttgaggattgtgttggtttatataaagattttatatttattggagatttttatttattttttttattttttattttttgtttttatttaatgtttgggtggagatgaagaagggttgattttttatattttattgttggagaattttaaatggtgaaaagtttttaaagggaaatttattttattgtttagaatgatgaaaattgatagatgaagagatttttgatttatattgttgtttaaatttttaggttttttaaattgagttggtttaaatttttgtggtttaatagaaatttttaattgtgaagattttggttttttgaaaataaggtaaaataaaataaaagaatattttttaggttttatgttaaattttagttttttttttttttttgagatgggtttttgtttttgtggtttagattggagtgtagttgtgaaattttggtttattgtaaattttgtttttgttttttgggtttaagtgatttttttgttttaggttatttagtagttgggattataggtatgtgattatgtttggttaattttgtatttttagtagagatgtggttttattatgttggttaggttggttttgaatttttgattttaggtgatttttttggtttggttttttatagtgttgggattataggtgtgagttattgtgtttagttaaattttagttttaaataatattgtattaatgatttataggaagggtatataggaattaaggggaagtttttaaattgggagatggtattagtttaagtagtgggtttgataatataaaagggttttgagaggtgagaaatatagttaaaaataataataataataaaaaaagagtgatttatttgggaaaatgtaaatgaatatatttgttgggagaaaaaatttaaaatatagatgtttgggataaatttggaaggtgtttatggatgattgttatatgggtaatatttattttttgtaaaataaaaaatatattgtttgaggtaattaaaaggattgaatttatttggtagttagaatgttttaattattttaatggataatgatgtttattggagattatttggagtagtgaaaaagagtatgaaatttggagttataaaattagatttagtattggtggaattatttaatagtttaataattttggatgagttattaatttttgagttttttgtgtatattaatttagataagtattttagaaaggggaaatgtggttatttaaaaatatatttataaattttttgatatttttttaattaagaggtggagtttaattttttttttaataaatatttattaattttatttgtttgtttttaagaaaaggtagtggtagtggtatagtgtaatttatttttaaggttaggttataaggtattagagtttttgtttgtttgtttttttttttttttttttttttttttttttttttttttttttttttttttttttttatttattttaaagtttttagttgttatgattattttagggttgttatgtagagatatgtgataaaattatagaaagaatgagagatgtttagagaagttagttgtttagttttatttttatttttagttgtttatattttttagtttaagttttgtgagtaaaattaatgatttttaatgttttaagttattattttagagtggtttgttatgtagtaatagattatttttttaaaaagaaaaattaagaaaattttttttttaatatatattaggttttagatagatgaaataatttttttaattaatttttaaataaattagtggggtttttatttaataaataaataaataaataagtggttatttttattttatatgtaaatgttttagttttattatttgtgaaatgaagatgattatagatttttatatattttttgggtttgttgggagaatttaaagagataatgtatgaaataggattttgtatattataaaatatattagaatgttggatattttattttttattatgtttttagtaaaaaggatttagagaggtattttatatatagaaggtaataatataagaagttataaattatgagatgttagttgagaaggatttttataaaaataattatgatatggattatggattataataatgatggtgataatattttaaataaatttgattgtagattttagaatattattttatagttgtattagggtaaaataattattgttataagatttaataaattttagaggtttaatatattaaaaatgtgttatttgtttttagtataaaggtttgtagggtataagtagagattagttttatagtagttatttagaaatttaggtttttgttatttaatgaatttatgtttttttagtgtaagttttttagtttattttttttattttttggttgatgagagaagagataatatagggaggattgtattgaaggtttatgtaggaggttagatttgaagtttgagataattattttttggtaagatgtttttagtttaaagtggattatattattttatttttattttttggttgtttttttgtaatatggttttggttttattaagggttaatatttttaagaatgttttttattttgggaggttgaggtgggtagattatgaggttaggagattaagagtattttagttaatatggtgaaattttatttttattaaaaatataaaaaattagttaggtgtggtggtaggtgtttgtagttttagttatttgggaggttgaggtaggagaatggggtgaatttgggaggtggagtttgtagtgagttgagatggtgttattgtattttagtttgggtgatagagtaagattttgttttaaaaaaaaaaaaaaaaaaaaaaaaaagaatgtttttgtattgtggttttattattaaagattttgtttgttatgtagttgagagtttttgatagaggtagttatatgattgattttagttttttttagtattgagtgttaaaagtatttatttttttttattaaattatatttttttttattagataaaagtatagagtttattttgttttttattttgttttggatttgttagaaagtatgtggtaagtttagaaagtataaatttttatttaatgtttaatttattattttttttgattttgtttataagtattttttgagtatttagtgtttattaaatgttagggatatagatataagagaaatattttttgtttttaggtaatttagtttgatgagggagatggattaataaatagatttgtgattgtgttaaatataatttatttgttattttatatttaatttattttttgagttgtaagattattttaatgtattttttgttttttggttgttggtaggtttagttaatggggtatttgatatgagatgaaggagaaggaaggagagtgaagttaagatagttatttttttgtttttttttttgtaagattgttatagtttatagttaaatataggttgttgttttttattaggttttgttttttattgggttttttttttttgggttttggtaattatttttttttttttgtttttttgagtttagggttggtgttagttttgttattattattttgggtttttgttttattttttatggtttttttgtattttttttatatttttttgaattgttttaatttgagtattttatttttg

SEQ ID NO: 305 - DNA, 6274 bp, Artificial Sequence
  chemically treated genomic DNA (Homo sapiens)
ggattatttgagtttgggaagttgaggttgtagtgagttaaggttatgttattgtattttggattgggtaatagagttagattttgttttaaaaaaaagaaaaattttatggttttgtttatattatttatttgattttatatgttgtttattttttttattaaaatttttagtttattaattatagtttttttataattaatattttgatgtgataatgttttagtttaattattgtggttataatagaatgttataaattgggtgatttataaataaaagaagttgatttaggttgatttagaggttggggagtttaagagtttggtgttagtatttgatgagtgtttttttgttttattataatatgggagagggtattatgtgtgaagagagtttatttttataatatagttatttttataagaattaatttattgttatgagagttatgtgaatttatttatgaggatagtgggttaagtttttaatatatggattttttggggatatatttaaattatagtagttagttgtaatgtttgtgttatgttttattttggttttgatgtttgtgtagtttttttaaattgtgtttttgttttttagtgtgttttgtaatgtggaaatgatatattgggtaagaggagttgtagtaaagaggtttttagtgatgtagtgataagttgtggggagagggagtgttgtatagttttgttgtatgttatagttttttagtgagtttgtgtttttggattgtgaattttatgtttgttttttagtttttttagttttttagatggtatagaattgttggaggggggtggagttgtatattttttttgttttgggtaggttattttttgataaaatattaggttaggtttttggtgaaataattttttttgagggtagattttttattaataatagaatgttttaatttattttaaaatggttttttttttttttttattgttagaagtataatgagattttttttttaatatttgtggtaaggatttagtagagttttaggaggtaatatttttaagtgttttatattattttgtattatgattgggttttgttggagtttttaatttgtagaattgtttatattgagttttttgtaattttttaattatagggtaaatttttttagttggtattgggtttttggaggtttttgtttgttggtttttttttttggaggttgtgtttttgtgtttgtttgtttttttaatttggggggtagtggtttgtttaatgattttaattttttgaaagagttaagaagaggtgttaattttttggtttgtttagttttttatttgttgttagaatggagtgttaatagtgttttttatagtgatatgtaatttttaattttagagatgatgaagtatattaatgataaaggagaaatgttttagtagttttttgttagtatattattttttgaaaaagttgttttttttatattttgtaagagatgggttttaatttagagtttaaggtaaatgattttttttaaggagaaggaataaatagttttagaaattatgaaagtttgtttttaggagtgtttttgaattttagtaggggttatatttattttgtagaaataggtgaggtatgtttttggtataaaattttaatggtatagaaggataaattgaaaaataagtttttttttaaatttttgattttgagttatttagtttttttttttagaggtaaagttgttattagatttttgtatttttttaatatatatttttagaagagttgttaagtgaatatatgtttaagtgaaaatttattttagaagtgtatttttttaaggaattttagggttggaaggaatttgtgttagtttttaatttataatttttattagtatttattgtttttgtataaaaattttttttaaaaaagttttttttattttgatatagtttattttatttttatttagttttaataatttataaaatatatttttgaaagtttaaaatttgttattatgttttttttttttaattaatttttattttgatttttaagttagagaaaataggtggttaaatgttttttgtttaagatggaatttagaatatttgaagattttagatttttattttgttaaataatgtgttttttttttttttttatagagtatttggttttaggaaatttagagttatattttttatagataagattaaatttttatttaatatatttagaaattttttttaagaggataattatttattagaggaaaaaagttttttatgtatagttggtaaagggatggaattatttgtgttattaaaattgatagatgtttatgagatttattaagggaaatattagagttttagtatatatttgttaatatagtatatatgaaggttttatttataatttttttggttaagtagaaattttggtattatttattttaataaatttttaagatattatgaaatagaattttaggttttgatattattatttgttttaggttttgaagtgttgttggataagaggggtaaaatatggttttgttttggatttaaagttggttttttatattagtaagtatattttggtattttggttattttttttggttatagtattatattgttataaaaggtagatataagtattaattagtttataggttattagataagtttagtttgattaatgtttaatatagtaattgggttattattgttatttttgtggtggtggtatatatatttagtttttgtttgggttatggtttaggattattttttatagaggttgtgagttagagttttaattgtgtagggttttaattatgttaggttatttattttttttaagaggattttattagtgtttgtttggttatatagttttttatttattaagtaatatagttattagtatattttaggtattagttaaggattataaaattaatgtgaatgttagtttttgtattaaaagtttaaaggagaaatttaaattttatatagatgttttatgaagatgtttagtaaatttatttttttttgttttttggaatttattttagtattgtgttatgtgtgtgtttagtaattttttataaaaagttttgttttttgtgatgttattagattatattgaagaatatataagttgtattatgaaggttgttgttttatatagttttaatgtagtgagaattgatgtttttatatgttgtttttttgggtatttaaagaaatttttgtatagttttataaattagttgtagtttaaattgatttgtgttgtgatttgtatatataggttatatttttttgatagaaaatatagtttaaaattaaatttgtagtttttgttaagtgaatgtataggattttattgtatttaggttttttattgtaagatttatttttgtttttattttatgttttattgttgtgttttttatttgtttttttttagttttgttttttgtgtttttatggattgtttttagtttaggtgtgtaggaagtatatatatgtttgtagagtttttatggtttttgtatttagggtatgattttaatgtatagtggttgtattgatttgttaaaataaaggaatagattattttttttaatttatagggaagttttaggttgtgtgggtagtgagtagatttgtgtttgtttgtgtttgttttggtgaaaaattttattgtttaggttgtagggtgtgagatttaggtataaatattttgttggatgaggaggaaagatgtaaggttgtttttttttagagatagtaaagggtaggtttgtagttttatttattttaggattgtgatttttgatagagttgagagattagggttgttgaattaggtttgaaggttttagtgaattttgtgaagagaggaggggtttggttgtaatatggatttagaggatatttttattgtaggagaaggaatagtggggatggggtggatttgttaaaggaatatagtttaagtttttgtagtttaaaaaagtttagttttttttggttaaagtttttgtgagtttttttggtattttttttgtgggagttataggggtagtgggatatttagtttttttaaaagtatttttatggttgtttgtgttaagtttttattttaagagttttatttttgtgaagtaatgtgttttatatattggttttaaagtatttatggttggttgtaataaatattaaggaggtttgtttttgtatttggagttgggtgtttttattttagatgattttgagggtgtttgataagatttgaaggatttttggattttagagtattattttggatgtttggtatttttgttgtgtgggtatggtgatttttttagttgttaggttagtttttgatttttgagagggttttgtagtgttgtaggggaggtggggatttgaataaaggagtagtttttttgttggtgttattatttgatgttggttttaaggtttggttagtttgtttaaagttggtataagtttgttttgtaaaataaaagaagggaaagggggaaggggattttggtatagatttggtttgatttggatataggttgggtttgtaagtttgtggggattgggtttagaggggtagtgttgggaatgttttttttggaaattaattttttagggtatttgttttttttttatgtgttgttttatttttgttggagattaggttttgtgggggttattgttgtttattgtttttggtggttgttggttttgggtttttgttgttggttttttttttttttttttgtatttttttttttttttgttttttttgattttttttttgttgtttggttttttttttttttgttttgtttttttgtgttttggtttgtgtgagttagatgtttgggtagtttttggtgtagtgtggttgtagtagtttttgttttttgtatggtgtgagtgtttgatgtggttgaggtggttggagttttgagttagttttggtggttgttgttgtttagattggatgataggttattttgttggtgtttgtttgagtttttgttttgttgttaatgttataattattgtgtatggttttttgattttgtttagtattgattgggagagttggagtgagttttttggggagtagtgatgtgattttttgggatggttggggtagtgtttttggtgttgttggttgtgttttgtttggtgagttgggttttggaggaaaagaaaggtaagggtgtgttttgttggtttttgtgttgtttttggattgtgttttggattttgtagtttgtttaattgtgtattggtgtattggtttggtgtttgtgtttttgtttgtttttttttgtttttttgagattagttgtgttgttgattgggattgtgggaggaatgggatgttttgttttttggttgggagagtttggggtgggtggaggaggagatgtgtgggatattgggttgtaggttaggtggggaatggttgttgggatttttggtgttttgaattgtttttaattttttttttttattttttttgtttagttgtgtaggattggtgttagtgggtgaaagttgggtgttggtgggtgtttggggttggggttttgtatgtgtgttttgtgttgtttttttagggtgtgatggggttttggtgtgtatttgaggggtgggtgttgtttatttgttgagattgtattgtttagggaagttgaggaaggaatttaaaaatatagtttttttttggattttgtgggataggtggttttttgagaggatttttttgtttttgttttttgtgtaggttttaaattgaagttggtgtttgttagtttggttttggtttttttttaggtttttgtgatttttgttttttagtgtggagttgtagttttgatttgggagttgggagaatttgtttattattatttgtggtttttggggaggggtggtgttggtggtggttagtttttttgttggtaaaaggtaggtggggtttgatttgttttttgggtgtagattttggttgtttgttttgtttggtgtgtttttgttttgtttatttaagagtgttttttattttttggggattttagtttttttttgggtgtttgtgttgaaagttttaggtttttttttgatggttgttttgtggagatgtttgggtttgttttatttgtagttttttggttgtgtttgggttttgtggtggagtgggatgtggttgt

SEQ ID NO: 306 - DNA, 6274 bp, Artificial Sequence
  chemically treated genomic DNA (Homo sapiens)
atagttgtgttttgttttattgtgaagtttaggtgtgattgaagggttgtaggtggagtagatttggatgtttttgtgaggtggttattgaaggagagtttggggtttttggtgtgggtgtttaggagggagttggggtttttgggaggtggggggtatttttggataggtaagatgagggtgtattgggtgaggtgagtggttggggtttgtgtttaaggggtgggttggattttatttgttttttgttaatgaggaaattaattgttgttagtattatttttttttgggagttgtaggtggtggtagatgagtttttttagtttttaggttgaggttgtgattttatattggggaatgaggattgtggggatttggagaggggttggggttaggttggtgggtgttggttttagtttgagatttgtgtggagggtggaggtggggaggtttttttagaaagttgtttgttttgtggggtttgaggggaggttgtatttttgggttttttttttagtttttttaaatagtgtagttttggtgggtgggtagtgtttgttttttgggtgtgtgttaggattttgttgtgttttgggaagatagtgtggggtgtatgtgtgggattttggttttaggtgtttattagtatttggtttttgtttattgatgttgattttgtgtagttgggtggggaaagtgagggaagaaagttgggagtggtttggggtgttggaggttttggtggttgttttttgtttggtttgtagtttggtgttttatgtgtttttttttttgtttgttttagatttttttggttgaagaatgaaatgttttgttttttttgtggttttggttggtggtgtagttgattttaaggaaataggaaaggatgggtgggggtgtgggtgttgagttggtgtgttggtgtgtggttgggtgggttgtggggtttggggtgtgatttgggggtggtgtgggagttggtgagatatgtttttatttttttttttttttagagtttgatttgttgggtagagtgtagttagtagtgttaggagtgttgttttggttgttttggagggttgtattgttgttttttgaagagtttgttttggtttttttgattaatattggatggagttagggggttgtgtgtggtggttgtggtgttggtggtgaggtggggatttgggtggatgttgatgaggtggtttgttgtttggtttgggtggtggtggttgttggggttagtttgggattttggttgttttggttgtgttgggtgtttatattgtgtggggggtggaggttgttgtggttgtgttgtgttgggggttgtttggatgtttagtttgtgtgggttgaggtgtggggaggtagggtgggaggaggagggattaggtggtggaggagggattgggaggagtagaggaggaggagaatgtgaggaggagggaggagaattagtagtggggatttaaggttagtggttgttggaggtggtggatagtggtggtttttgtgggatttagtttttggtgggagtggggtggtgtatgggaggggagtgggtgttttgaggagttaatttttgagaggggtgtttttagtattgtttttttggatttggtttttgtggatttgtaggtttagtttatgtttaggttgagttaaatttgtgttagggtttttttttttttttttttttttttgttttataaagtaaatttgtattagttttagatagattggttgagttttagagttagtgttggataatggtattgatggggaaattgtttttttatttgggtttttattttttttgtagtattatgggatttttttggggattagaggttggtttggtagttgaggaggttgttgtgtttgtgtggtaggggtgttaggtgtttgaggtggtgttttaaagtttgagggttttttagattttgttaagtatttttgaaattatttgaaatgagggtatttaattttgggtgtagagataggtttttttaatgtttattgtaattagttatgggtattttgaagttaatgtgtgaagtatattattttgtaaaagtgaagtttttggaataaaggtttgatataaatagttgtggaggtgtttttagagaggttaagtgttttattgtttttgtagtttttgtaggagaaatgttagggaaatttgtggaagttttggttaaaagaaattgagtttttttgggttgtaggaatttgagttatatttttttggtaagtttattttatttttattgtttttttttttgtagtaaaaatgttttttaggtttatgttatagttagattttttttttttttatgagatttattaggatttttaggtttggtttaataattttgattttttggttttgttaaaaattataattttgaagtaagtgaagttatagatttgttttttgttgtttttgaaggggagtaattttatattttttttttttatttagtaaaatgtttgtgtttgggttttgtattttgtagtttgaatggtggggttttttattagggtaagtgtagatagatataggtttgtttattgtttgtataatttggaatttttttgtgaattaggagaagtaatttgtttttttgttttaataaattagtatagttattgtgtgttgaagttatgttttgaatgtagaggttatgaaggttttgtaggtatgtgtgtgttttttgtatatttgggttgagagtagtttgtagaaatatagaaaataaaattagagaaaggtaaatgggaagtataatagtggaatataaaatgaagataggagtgagttttataataaaagatttgaatataataaagttttgtgtatttatttaataagggttgtaaatttggttttaaattatattttttgttaagggaatgtgatttgtgtgtataagttataatataaattaatttaagttataattgatttgtaagattgtataggaatttttttgagtgtttaaaaagatagtatgtaagaatattagtttttattatgttaggattatatgagataatagtttttatagtatggtttgtatattttttaatgtgatttgatagtattataagaaatagagttttttgtaaagaattattagatatatatatagtataatattgggatggattttagggaatagagaagaatgggtttgttgaatatttttatgggatatttatgtaaagtttgagttttttttttgagtttttgatataaaagttgatatttatgttgattttgtagtttttggttagtatttggagtgtgttgataattgtgttatttggtaagtaaaaaattgtatggttgagtaggtattaatgaagtttttttaagagagataagtagtttggtatagttagggttttgtatagttagggttttagtttatagtttttgtggagggtggttttagattatggtttggatagaggttgggtgtgtgtgttattattataggaatgataatagtggtttagttgttgtgttaagtattggttagattaagtttatttgataatttgtgagttggttaatatttgtatttgttttttatagtaatgtgatgttgtggttgggagaagtgattaggatattaaggtatatttgttagtatgagaggttaattttgaatttaaggtagagttgtgttttattttttttgtttagtaatgttttaaaatttgagataaatggtgatgttaggatttaaaattttattttataatgttttggaaatttgttagggtgagtaatattaaaatttttgtttggttaaaaaaattatagataaagtttttatgtatgttatattagtaagtatgtattaagattttagtattttttttaataaattttataagtgtttgttaattttaataatatagatggttttatttttttgttagttgtatatgagaaattttttttttttgatgagtggttatttttttagaagaagtttttgagtatgttgaataagagtttagttttgtttataaggaatgtggttttgaattttttaaaattaaatgttttgtgaaaggggaggagaaatatgttatttggtagggtgaagatttgaggtttttaaatattttaagttttattttaggtaaaaggtatttgattatttgttttttttggtttagaggttaaagtaaagattgattaggaaaaaaaaatatagtggtagattttagatttttaaaaatatgttttataagttattggagttaagtaaaagtagaataagttatgttagagtggaaagggtttttttgagaaagatttttgtgtaagaataataagtattaatggaggttgtgaattaaggattgatataggttttttttaattttaaagttttttaagaaaatgtatttttaaaataggtttttatttaaatatgtgtttatttgatagtttttttaaggatatatgttaaggagatataagaatttggtaatagttttgtttttagggaggagaattaggtagtttggggttaggggtttagagggagatttgttttttaatttgtttttttgtattattgggattttgtattaggagtatgttttatttatttttgtaaggtaagtgtggtttttgttgaggtttagggatatttttgggggtaggtttttatggtttttgagattgtttattttttttttttgaaggaagttatttgttttgagttttgagttgagatttattttttgtagaatgtggaagaagtagtttttttaaggggtaatgtgttgatagaaaattgttgaagtattttttttttgttattagtatgttttattatttttagagttgagggttatatgttattataggaggtattattggtgttttattttagtaataagtagaaagttgagtaaattgaaaaattaatatttttttttagtttttttagagaattgaggttattgggtaaattattgttttttaaattggagagataggtaaatatagaagtataatttttagaggaagaaattagtagatagaaatttttaaggatttagtgttggttgggaaagtttgttttgtaattgagaaattgtgggaggtttagtgtgggtagttttgtaaattaagaattttagtagagtttagttatggtgtagggtagtatgagatatttgagagtgttattttttggagttttgttaggtttttattatgaatattagggggaaaattttattatgtttttggtagtggaaggagaagaggaattattttgaaataggttggaatattttattattaatagaaggtttgtttttaggagaaattattttattagaggtttaatttggtgttttattagagggtgatttatttagagtaagggaaatatataattttatttttttttaatagttttgtattatttaaggggttggggaagttgagaagtaagtatgaagtttatagtttagggatataggtttattggaagattgtgatatgtggtaggattgtgtaatattttttttttttatagtttgttattatgttattagaagtttttttattatagttttttttatttagtatattatttttatattgtaaggtatattaaaaggtaaagatgtagtttgaagagattgtataagtattagaattagaatgagatatgatatgaatgttataattaattgttgtggtttgaatgtgtttttgaaaagtttatatattggaaatttaatttgttgtttttatgaatgaatttatatggtttttatggtggtgggttaatttttgtgggagtggttatgttataagagtaagttttttttatatgtgatgtttttttttatgttatgatgaagtaagaagatatttattagatgttagtattaagtttttggattttttagtttttaaattagtttaaattagttttttttgtttataaattatttagtttgtggtattttgttataattatagtaattggattaagatattattatattggagtattaattataaaaaaattatgattaataggttaggagttttaatggaaaaaataggtaatatgtaagattagatggataatgtaagtagagttatggaattttttttttttttgagatagggtttggttttgttgtttaatttagagtgtagtggtgtgattttggtttattgtaattttaattttttaggtttaggtgattt

SEQ ID NO: 307 - DNA, 3000 bp, Artificial Sequence
  chemically treated genomic DNA (Homo sapiens)
atatttaaattgtatatttggtttgtaatatattatatatttaaaagaattattatttttttgaatattattaatattaataatagtattatagtgattaagagtggatttaaataaaggttggtttgaaatttaggtttgttatttattagtaagtttttaaaaattttgagtttttagtttttttatatgtgaaatggagaaaataaatttgtaaaattaattaaatttgtttatttatatttttttttttagtgtatattaattggtattttttgttaggttagaatgtgtttttaattatgttttaaatttgttttgtgttaattttattgttagaattttttttattttgagaattagaaaaggaaatattatgtttggtaatgtttatattttttaaaataaatttgtaggaaagaatatttagtaagtgatgagagtagtaatgattgtttttattattttaaatttataatattattttttttagagttttttaagtattgtagataattttttatttattaaaaaataaattgtaattataagtatttagggttgatattgtttttgaattagatagtgtttatattagttgtataagattaatttaaagtagaggatgaaattttttttttgaattttttttagaatgtaatttagtgaatatattaaaattaaattttttttgaatgggagtaatttttatggattaatttgtaattttttagattatatttaaggtaatgtagaggttgttgtattataggttttgtgattagagattattggatttgtttttggaaaagttatttatgattttttgggttttggtttttttattttttatattggtttaataatgattattgtagagttgttatggaagttaaatgaatttatgtattataagtgattaatataatgattgatatttagtgatttattaataaattaaaatatttattattaatatgatagagaaggtgttgttaaaatagataataggtttttggaagaggtgattaaatggatgtaaaatttatggattgtttattttgtttatttttgttgtgttttttggttgtggtatatatatgtgtgggtataaaattgtaaattttatgtagttgtgtagtgtatgtgtagaaggtttagatatgaaatgttattttagtaatgtgtttagagaagttttgatgttgttttggaagtaagttgttgttgtttgatttttgggtgtttgggatggatgtttatatttgtatttagtagtattggaaggggtttaggttttttgtagtatagtttatttttagattgtttagttttttataatatatatttttatggaaaagggtatttttttttgttagaaaaagtgttttagtttggtttgggttggtttttattttatgttgttgtaagtaggtgaagttttttttgtttttttttttggggtaagtggaaaggagtttggtagggggtttgtagtggtttgtataggggaattgggtagtgagagagttttaggtaattttgggggttgttttatagaagtaggtggggattgatagtggttttttggtttagggaggagagtgtggttgtgggtttttttttttagtttggaggttgtagttgtttgagttggtttgggtgggggtggggtgggggtggtgtggagggtatggagattatggtggtgttatttgggatatttagggttttgaggttttgggtggtttttatgtgagattgtaaattatgataataggtagttatttgaggttaaataaaaatggagtgggttttttgtgtgttgttgttttttgtgtttttggtggttttttttgaggtttttggtggttttatgagtttgtagtagttggtggtgatgttgtttttgttttatttttttgtgtaagtgtgaggttgttggtagtgtggtgtatgttttggttgtttttggtttttgtgtaaaatttttattttgtttatgtgaagttgttgttgttttagagagggggaaagagttgtgggaaaagttggggagtgatgattgtggtggttgggtgtgtttttttattttttttttttttttttttttttttgttgtagtttggagttttggtttttttttttttttttttttttttggagttggtttttttttttgttttgttttttttttgtttgtgtatgttatttgttgtggggtggttgaaggggatgttttgtttttattagaggtatagtgtgaaggggaaattttgatattggaaggaatgagaataaatatttaattatggatgtattgaattgtggttgggatagatattttgggaatttgaggtggattgggtgatgaggtgagtgatttttttttttaatttttgttttagggtttttgggggagtttgagttgagagaatttttaaattttttgggaaagtgtgtgaggttttgttggggatgttgagtgttgggtattgaggatgtgtagttggatggtgtgtgggtgtttgtgtttttggggggtgtttggaggttgggtgttttatgtttgagggtttgggttgtttggattgtagtggtgttttttgttttagaagatgtttttaagttttaagggttttttttgagtttgtttgttttttttggggttggtgtggagtttgtgtgtaatggagtttatttagtagtttagtgtgtggtttttatttgtattttgtttttatttggtagaggtgtgagtattggggttttttttatattttttttatgatgtgtattattttttgatgattttttagatggtttaggtgtgaggatgttgatttagagttttttggagggttataggtgtttgggtttttttggtgttgggtgtgtgtgtattttaaaggtttgtgttttaatttttaggtattgattgggttttttaattgtggtgattttattttaatagtttttatgtggtgtggattgaatgtt

SEQ ID NO: 308 - DNA, 3000 bp, Artificial Sequence
  chemically treated genomic DNA (Homo sapiens)
gatatttagtttatgttatataaaaattattaaagtgggattgttgtagttgaaaagtttgattagtgtttggagattagaatgtgagtttttaaagtatatatgtatttggtattgggaaagtttaggtgtttgtgattttttgaaggattttgggttagtatttttgtgtttggattatttagggggttattagaaagtaatatatgttataagaaagatgtgggggagattttgatgtttgtgtttttgttaggtggaggtggggtgtaggtagaagttgtgtgttggattgttggatgaattttgttatgtgtaggttttgtgttgattttggaagggataggtaggtttggaagggatttttggggtttggggatgttttttagggtagagagtattgttgtggtttgagtggtttgggtttttaggtgtggggtatttggtttttaagtgttttttggggatgtaggtgtttatgtattgtttagttgtgtgtttttagtatttagtgtttggtgtttttggtggagttttgtgtatttttttggaaagtttgggggtttttttaatttaggtttttttgggagttttggggtgggggttggaagaaggggttatttattttgttgtttggtttgttttgggtttttgaagtgtttgttttagttgtggtttagtgtgtttgtaattaagtatttatttttgttttttttagtgttgaagttttttttttgtgttgtgtttttggtgaaaataggatattttttttggttattttataataaatagtgtatataagtgggggagaagtggggtggagggagaagttggttttgagggggaggaggaaaggagaggagttaaaattttggattgtgataggggggaaaggagaagaaaagaaaatgagagagtgtgtttagttgttgtagttgttattttttggttttttttgtagttttttttttttttttaaggtagtgataattttatgtggataggatggaagttttgtgtggaagttgggaatggttggagtgtgtgttgtgttgttggtagttttgtatttgtgtagggaggtggggtgggggtgatgttgttattggttattgtgggtttgtgaggttgttgggggttttgggggaggttgttagggatgtggggggtggtggtgtgtgggggatttattttgtttttatttgattttgggtgattgtttattgttatggtttgtgattttgtgtggggattgtttagggttttggggttttggatgttttgggtggtgttgttgtaatttttgtgttttttgtgttgtttttattttgtttttatttgggttgatttgagtggttgtagtttttaggttgaggggagggatttgtgattgtgtttttttttttgggttggagagttattgttgatttttatttgtttttgtggggtagtttttggaattgtttggaatttttttgttatttagtttttttgtgtaggttattgtgggttttttgttggatttttttttatttattttaagggaggagatagaagggattttgtttatttgtaataatgtgaaataaaaattaatttagattagattggggtgttttttttgatgggaggaaatatttttttttgtggagatatatgttatgaaggattaagtggtttggggataggttgtgttgtgaagggtttgggttttttttagtgttgttgggtgtaggtataggtatttgttttagatgtttaaaggttaggtagtaatgatttatttttaaggtggtgttagagtttttttaggtatattgttgaaatgatattttgtgtttaagttttttgtgtatgtattatgtgattatataggatttatgattttatatttatatgtgtgtatgttataattaggggatatagtaaaggtagatggaataaataatttataaattttgtatttatttaattattttttttaaaaatttattgtttattttagtggtattttttttgttatattgataataaatgttttaatttattgataaattattgagtgttaattattgtattggttatttatggtatatgagtttatttaatttttatgataattttatggtggttattattaagttggtataaaagatgaggaaattaaagtttaaagaattatgagtgatttttttaaagataaatttagtggtttttaattataaagtttatgatataataatttttatattattttaggtgtggtttaagagattatagattaatttgtagaaattatttttatttaaagaaagtttagttttaatatatttattaagttatgttttgaaaaaggtttagaaaaaagattttattttttattttaggttggttttatgtaattgatatgagtattgtttaatttaaaagtagtattaattttgaatatttatggttataatttattttttaatgagtggggaattatttataatgtttaagaggttttagaaaaggtggtgttgtaaatttaaaatgataaaggtagttgttgttgtttttattatttattgggtgtttttttttgtagatttattttggagggtgtaggtattgttaggtataatgtttttttttttggtttttaaggtagaaagggttttggtagtggggttggtataaagtggatttggagtatggttgagagtatattttggtttaatgaggaatgttagttaatatatattggagagaaaaatatgaatggatagatttaattaattttgtagatttattttttttattttatatgtgagaaaattaagggtttagaatttttagaagtttgttaataaatggtagatttgagttttaagttagtttttatttaagtttatttttagttattgtgatgttattattagtattaatggtatttagaaaaatagtaatttttttaaatatgtaatatattataagttaaatatgtaatttaaatgt

SEQ ID NO: 309 - DNA, 5649 bp, Artificial Sequence
  chemically treated genomic DNA (Homo sapiens)
tggtggtttatatttgtaattttagtattttgggaggttgaggtaggtggattataaggttaggagattgagattattttggttaatatagtgaaattttgtttttattaaaaatataaaaaattagttgggtgtggtggtgggtgtttgtagttttagttattttggaggttgaggaaggagaatggtgtgaatttgggaggtggagtttgtagtgagttaagattgtgttattgtattttagtttgggtgatagagttagattttattttaaaaaaaaaaaaagaaaaaagaaaatattttaagttttgaggattatatagtttttgttgtaattatttatttgggttattgtagtataaaaataaatatagataatatatatatgagtgagtatggttggggtttaataaaattttatttatataagtaggtgatgaattatggtttatagtgttttaatttttgatttagatggtgaattattatgagtttttgttgttttttttggtagaaatatgggagaaattatagagagaaatagagattttaggaaaatagtaaaattaaataaataaagtgagatgttgttttttttggaggttgtaggttgtgttgaatttgtgtgtgtttgggtgtatagggatgtgagtagatgtgtgtggagatgtgtgtgtgggtggagattgagtgtggttggaggtggttgtggtaggatgttagaaggaaggagtttgtatttagtttttttattagtattttttggagttgttgaggggatgttattgttgaatattgattttggtgtaggttaaattgaagttagtttttgttattttttgttgggtgaggtattggggagaatagtgggattgaatggggtgggtttttttttttttatattttttttggaaatatttagtattagtatattagaatatggggagttattttttttagtgttgttttttaaggtttggaaggggaaattttgattttaagttttgtttgaagagtgatagtaaaggggagaggttggttgtggtttggtggtgtttattttttttttttgttttgaaattataggttggtatattatttgagagaatgattagtgttattaagggaagggtataagtttattggttttaggggagatattttaggggataggaatattttttgatgttgaatgagtgtagtatatagatggagaatatatataagagaaattatgaggatatgagagaaggtattggtaataggaagttataaaaagtaataaaaagaaagagtagatataaaaataataattgaagaaagttaataatagatgggatgaattatatgaggtatgtgatttatggatgaagaggtgagtgatgagattagttggggaatttttttttaggaaagataaattagaagaaatataaatgatattgaagtggttaggtgtagtggtttatgtttgtaattttagtattttgggagtttgaggtaggtggattatttgaggttaggagtttgagattagtttggttaatatgatgaaattttgtttttattaaaaatataaaaattagttaggtgtggtggtaggtatttgtgattttagttatttaggaggttgaggtaggagaattatttgaattaggaagtagagattgtagtgagttgagatggtgttagtgtattttagtttgggtagtagagtgatagtttgtttaaaaaaaaaaaaaggtagtaaagtgataggaggatagattagaagggttattttttagatagtgtaaggaagaaagaagaagaagaagaggaggaggaggaggaagaggaagaagatggagaagagggtattttagaagaaataatggagatatattttttaaaattgaagaaagatgattaattttagattgaaggttaagaggtaaattagagagatagtttggtaagttaggaagagtattaaagttagataattagagtgaaattaaagaaaatttaaggtgataaaaatttaaaaagtttttttgtgattttagtttattggtgaaaatttaaaaaaaaaaaaaaaaaaaaaaggatagtttgggtaatatggtgaaattttatttttataaaaaatataaaaattagttgggtgtggtggtatatgtttgtagttttagttatttgagaggttaagtaaggtaggaggattatttggggttaagagttttagattagttgtggtaatatatatgttgtgggaagttaggtattttgaatggagggattggttgaagttatggtagaagaatataaattgtgaagattttatggatatttattatttttttaattaatatttttgtgattttttatgtttgtttttaattttttaattttgttatttttgtaaattgaggatgtatgttgttttaggattttgtgatgattgtgttaattgtataaattgtttgtagaggataattgttgtgtgtttgagtaatgtgaaatttgggtattttaagaataggataatagtaatttttagggaataagggagataattttaaagtttggttgtttgtgggttgggtaggatagagttatattttttttattattgtaaataggtaagagaaatattgttgaattttttttttagtaaggaatattaataattaatagttttgagaaaagaatgtatttttagggttgggttattgaaatggtttttttgagagtgtttgtttttatttagaagtagaaagggatgaaatatgttttagttttttgtagtatttttagatttgataggattaggaaattttagtttggtaaattttagttagattggttttttgtttttgaattttgatagtgtgtgttagtgggatttggaagtttattagtgattttagttttgttgtgattttttgttttgtgattttttgttgtttttgaagtatgtgatttttgtgatttatattttgtttgtgtatttttttttttttgaaaattgttaataaaaatttgttggttttatggtttagggggtattatggaatttgtggatatgtgatgttttttttggatatttggttttaaaatgttttttttttgtattttttttttttattttttaggttagttgatatttagggaaaataggaaaggatttatgtgaaatattgggggttgaattttttttgataataagttttttaaaaaagatttttaaatgaaatttttttgttttttaatttttatttttgttttgggggtatatgtgaaggtttgttatataagtaaatttgtgtttttggtgtttgttgtatagaatattttattatttaggtattatgttgagtatttaatagtttttttttttgtttttttttttttttttattttgtattttggagttaattatagtgtttgttgtttttttgtttgtgttataagtttttattatttagtttttatttataagtgagaatatttagtatttggatttttgtttttgtattagtttgttaaggataatagtttttagttttatttatgttttataaaagatatgatttagttttttttaatggttgtattaaatgaagttttaaagatataatataaatattaattttttttttattataaaaattttttgttgaatttgattatatttaaattaatgagttttgttttatgaaagattttttggataaatttgatagttgatggaataggagaagttgtttgttatgtttaaagttaataagagattaatatttagaataaatggagatttgtaaattaatagaaagtaggtagtaaagttaaagaaaatagtttaaggtatagttattaaaaggaatgtgattatgttttttgtagggatatgggtggagttggaagttgttagttttagtaaatttatataggaatagaaaattagtgagattgtatggttttatttataagtgggagttgaataatgagaatatatggttatatggtggtgattaatatatattggtgtttgttgagtggggtgttggggagggagagtattaggaagaatagttaagggatattgggtttaatatttgggtgatgggatgatttgtatagtaaattattatggtgtatatatttatgtaataaatttgtatattttttatatgtattttagaattttaaataaaagttggatggttaggtgtggtggtttatgtttgtaattttagtatttttgggaagttgaggtgtgtagattatttaaggttaggagtttgagattagtttggttaatatggtgaaattttgtttttattaaaaatataaaaattagttagatgtggtatgttatttataattttatttatttgggaggttgaagtagaattgtttgaatttgagagtggaggttgtagtgagttgttgagattgtgttattgtattttagtttgggttatagtgtgagattatgttataaaataaaataaaataatataaaataaaataaaataaaataaaataaaataaaataaaataaaataaaataaaaaaataaaataaaataaaataaaataaaataaagtaatttttttttttttaagtggtttttattttttttttttgttttgtgaagtgggtgtgtaagttttgggattgtagtggttttagggaatttttttttgtgatgttttggtgtgttagtttgttgtgtatattttgttgtggttttttttttgttgtttgtttattttttaggttttgttgggatttgggaaagagggaaaggtttttttggttagttgtgtggtgattttggggattttagggtgtttttttgtggttgatgtttggggtgtagtggttgttggggttggggttggtgggagtttgtgggattttttagaagagtggttggtgttgtgatttagtattggggtggagtggggtgggattatttttataaggtttggaggttgtgaggttttgttggagttttgttgttgtagtttttgttattagtgagtatgtgtggtttgtgtttttggggatggggtttagagtttttagtatggggttaatttgtagtattaggtttgggtttttggtaggttttttgtttattttgagatttgggatgggggtttaggggatttaggatgtttttagtgttgttagtggtttttagggggtttggagtgttttggggagggatgggattttgggggtggggagggggggtagattgtgtttattgtgttttggtatttttttttgggttttagtaaatttttttttgtttgttgtagtgttgttttatattgtggtttattttttagtttgaggtaggagtatgtgtttggtagggaagggaggtaggggttggggttgtagtttatagttttttgtttatttggagagatttgaatttttttatttttttgttgtgtggtttttattttgggttttttttttgttttttgttttttttgttatgtttgttttttgttttagtgttgtgtgaaatttttggaggaatttgtttttttgttttttttttgtatttttgatttttttttgggttgttgtgaggtggagttggtttggtttttatattttgtatttttttttttttgtagt

SEQ ID NO: 310 - DNA, 5649 bp, Artificial Sequence
  chemically treated genomic DNA (Homo sapiens)
gttgtggggagggagaagtatgagatgtggggattgggttgattttgttttgtagtaatttggggaggggttaggagtgtagggagggaatagggaaataggtttttttgaagattttatataatattggggtggggagtaggtatggtgggagaggtggggaataggaaggaggtttggggtaaaagttatatgatggagggataagggggtttggatttttttgggtgggtgaggggttgtgggttgtagttttagtttttgttttttttttttgttagatatatgtttttattttgaattgggaaatagattatggtgtagggtggtattgtagtgaataaagaaaagtttgttggagtttgggggaggatgttaaggtgtggtgagtgtagtttgttttttttttttgtttttggggttttatttttttttgaggtgttttgggttttttgaaagttgttaatggtattggggatgttttgggttttttaggtttttgttttgggttttgaggtgggtgaggagtttgttgggagtttgggtttgatgttgtgggttggttttatgttgggagttttgagttttatttttggggatgtgggttgtgtgtatttattggtggtgaagattgtggtggtgaaattttagtgaagttttgtggtttttgagttttataagggtggttttgttttgttttgttttagtgttgagttatggtgttggttgtttttttggagggttttgtggatttttgttggttttagttttggtggttgttgtattttgggtgttggttgtagaggggtgttttggagtttttggagttgttgtgtagttggttggggaagttttttttttttttttaggttttagtggggtttagggagtaaatagatagtaggaagaggattgtagtgaagtgtgtgtagtgaattggtgtgttgggatattgtggggggaaattttttaagattgttgtgattttggagtttgtatatttgttttatagggtaggggagaggggtggaggttgtttagaggaaaggaaattgttttattttattttattttattttattttatttttttattttattttattttattttattttattttattttattttattttattttgtgttattttattttattttatgatgtagttttatgttgtggtttaggttggagtgtagtggtgtgattttggtggtttattgtaatttttgtttttgggtttaagtaattttgttttagttttttgagtaggtggaattataggtggtgtgttatatttggttgatttttgtatttttagtagagatggggttttattatgttggttgggttggttttgaatttttgattttaggtgatttgtatgttttggttttttaagagtgttgggattataggtgtgagttattatgtttggttgtttaatttttatttgaagttttggggtatatgtagaggatgtgtaggtttgttatataggtgtgtgtgttatgatggtttgttgtatagattattttattatttaggtattaagtttagtattttttagttattttttttggtattttttttttttagtattttgtttaataggtattagtgtgtgttgattgttgttatgtgattatgtgtttttattgtttagtttttatttataagtgagattatgtggttttgttggttttttgtttttgtgtgagtttgttgaggttaatggtttttagttttatttatgtttttgtaaaggatatgattatgttttttttagtggttgtgttttaggttattttttttggttttgttgtttattttttgttgatttgtagatttttatttattttagatattgattttttgttggttttagatatgatagatagttttttttattttattaattgttaagtttgtttaaggagttttttatgaaataaaatttgttaatttaagtgtaattaaatttagtaagggatttttgtggtggggaagaggttggtgtttatgttgtatttttaaaattttatttaatgtagttattaaaaagaattagattatgttttttgtgggatatggatggagttagaggttattatttttagtaaattaatgtaggaatagaaatttaaatattggatgtttttatttgtaagtgggagttaaatgatgagaatttataatataaataaggaaataatagatattgtggttgattttagggtgtaggatgggaggaaggagaggagtagaaaagagaattattgggtatttggtataatatttgggtgatgaaatattttgtataataaatattgaagatatgagtttatttatgtaataaatttttatatgtatttttaaaatagaaataaaagttaaaaaataaagaaattttatttaaaagttttttttaagagatttattattgggggaaatttagtttttaatattttatgtgggtttttttttattttttttaagtgttggttggtttgagaaataaagggaaagagtataaaagagagatattttaaagttgggtgtttaggggagatattatatgtttgtaggttttgtgatgttttttgagttgtaaaattagtgagtttttattagtaatttttaaagaggagggagtgtatgaatagggtgtgggttatagagattatatattttaagggtgataaaagattatagggtagaaggttatggtgaaattagaattattaatgaatttttaggttttattggtatgtattgttagggtttaagagtagagaattggtttgattagaatttgttaggttggaattttttaattttattaagtttgggggtgttgtaggagattagggtgtgttttatttttttttatttttgaataaaggtaggtatttttagggaggttattttagtggtttggttttgggaatgtattttttttttagggttgttaattattaatattttttattggggaaagaatttagtgatattttttttatttgtttgtggtaataagagaagtatggttttgttttgtttagtttataggtagttagattttaaggttattttttttgttttttgaaaattgttgttattttgtttttaagatgtttagattttatattgtttaaatatataataattgttttttataaataatttgtgtagttaatgtagttattatagggttttaaggtgatatatatttttagtttatgaagatgataggattaagagattaaagataggtataggaaattataagagtattgattggggaagtgataaatgtttatgaaatttttataatttatgtttttttgttatggttttagttagtttttttgtttggggtgtttgattttttataatatgtatgttgttgtagttggtttggaatttttggttttaagtgatttttttgttttatttagttttttgaatagttgggattataggtatgtgttattatatttagttaatttttgtattttttgtagagatggggttttattatgttgtttaggttgtttttttttttttttttttttttttaaatttttattaatggattgaggttataaggaagttttttaaatttttgttattttgggttttttttaattttattttaattgtttagttttggtgttttttttggtttgttaagttgtttttttggtttgttttttggtttttggtttgaggttggttatttttttttagttttgagaaatgtatttttattgttttttttgagatgtttttttttttgtttttttttttttttttttttttttttttttttttttttttttttttttttgtattatttggaaaatggtttttttaatttatttttttattattttattgtttttttttttttttagataggttgttattttattgtttaggttggagtgtattggtattattttagtttattgtaatttttgttttttggtttaagtgatttttttgttttagttttttgagtagttgggattataggtgtttgttattatatttggttaatttttgtatttttagtagagatagggttttattatgttggttaggttggttttaaatttttgattttaagtgatttatttgttttgggtttttaaagtgttgggattataggtgtgagttattgtgtttggttattttgatgttatttgtgttttttttggtttgttttttttgggagagagttttttagttgattttattatttatttttttatttatgagttgtatattttgtatgatttattttatttgttgttggttttttttgattattgtttttatatttattttttttttttgttgttttttgtaattttttattgttagtgtttttttttatgtttttatgattttttttgtgtgtattttttgtttgtgtgttgtatttatttagtgttaggggatgtttttgttttttgagatgttttttttggaattagtgagtttgtgttttttttttggtggtattggttatttttttgggtagtatgttagtttgtggttttaaagtaaaggaaggagataagtattattaaattatagttaattttttttttttgttattgttttttaaatagagtttgaggttagagtttttttttttgaattttgggaagtagtgttggggaaggtggttttttatgttttaatgtgttggtgttgggtgtttttaggggaagtgtgggagggagaaagtttgttttatttagttttattgttttttttagtgttttatttagtagagggtagtagaggttaattttggtttagtttgtattagggttagtgtttagtagtgatatttttttaataattttagagagtattaataaaggaattgaatgtaaattttttttttttggtattttattatagttatttttagttatgtttagtttttatttatatatatatttttatgtgtatttatttatatttttgtatatttagatatatataggtttaatatagtttgtagtttttaggaggggtgatgttttattttatttgtttaattttattgtttttttgaaatttttgtttttttttgtggttttttttatatttttattggagagggtaatgaaagtttatgatagtttattatttaaattaaggattgggatattatggattgtggtttattatttgtttgtgtaaataaagttttattgggttttagttatgtttatttatgtgtgtgttatttatgtttgtttttgtgttatagtggtttaaatgagtgattgtaatagagattatgtggtttttaaagtttaagatatttttttttttttttttttttttttgagatggagtttggttttgttgtttaggttggagtgtagtggtatgattttggtttattgtaagttttattttttgggtttatgttattttttttttttagtttttagagtagttgggattataggtgtttgttattatatttggttaattttttgtatttttagtagagatggggttttattgtgttagttaggatggttttgattttttgattttgtgatttgtttgttttagttttttaaagtgttgggattataggtgtgagttattg

SEQ ID NO: 311 - DNA, 12781 bp, Artificial Sequence
  chemically treated genomic DNA (Homo sapiens)
tattatgttgttagttggttttgaatttttggttttaagttatttttttgttttggttttttaaagtgttgggattgtaagtgtgagttattgtttttggttagttggtgatttatttgtataattgtttaatttattgaatatgtatggtgtgttaagtattgggttgagggttttataatgtttttttatttaatgtttagtataatttatgaagaaggtagtgttaatattatttttgttttatagatgtagaaattgaggtataggttaaataatttgtttaataagtttgtgtagtttagtaagtagtttagttgggatgtgaatataaattttgaatatagagtttttaattagtaggttagaggtttttaaatatttagtatatttattattttagtatttttttgttatattttttaggttaaaataattttattgattgttatgtaatttattaagtgtagttatttgaaaaaaaaatatatataaaagaaaaatatttttatttagtttttaaaataatttatatatagttatggaatgtatgtgttggttgggtattgtagattaaagatagtttagggttgggtatggtggtttaggtttgtaattttagtattttgggaggttaagtagagagaagggtttgagtttaagagttggagattggtttgggtaatatagtaagatttagtttttatagaaaataaaattattagggtgtgaggatgtatatttgtagttttagttgtttgggaggttgaggttggaggattagtttgggtaatagagtgagattttgttttagaaaaaaaaaaaaaaaaagatagatttttatttagatatgtatgtaggagtttatagaaaaaaaaagtgagtttaggaggttgttatttggtatttatataatttttttttttttgaattttgaaatttattttatatatattatttaataggggaagaggagggagaaaaagttttttatgggaagaataaataggtttttgggggaataaaagggagataagaatgtttgtttttgtaggtgtaagtggtttttgtttttttttttggttattaaaatttttttagagaggagatttatggtagttttatttttagaaatttttgttgttagttgtataagggaagttttgaaatggtatttttttgtatttgttggtttttaaatgtttttagttttaagtaatatttatgttaattttgggggtttgagtgtttttatataatatatgtgtttttttgttttttaatgaagtttgtgggaggtatttaattgtagtttttaaaatttggtttataggtattattgtttttattaaagatgaggaaataagtttagaaaagtattaattgttttgagttatttgtttggttagttaggattagagtttagttttttatttaatttaaagtttaggtttttaattttttataattggtgtattttttttgaatttttattttttttttgtaaaagaataatattggttgggtgtagtggtttatatttataattttagtattttgggaggtagagatgggtggattatgaggttaggagtttgagattagtttggttaatatggtgaaattttatttttattaaaaatataaaatttagttgggtgtgttggtgtttgtaattttagttatttaggagattgaggtaggagaattgttttaatttgggaggtggaggttgtggtgagttaagattgtgttattgtattttagttttggtgatagagtaagattttatttttaaaaaaataaataataataataaaaagagaataatgttatatttagttgaattaaaatgaattaaatattaatatttgtattttaaaaatggtttagtttggttgggtgtagtggtttttgtttgtaattttaatattttgggaggttgaggtaggaggattatttgaggttaggagtttgagattagtttggttaatatggtgaaattttgtttttattaaaaatataaaaattagttgggtagtagtagtgtgtgttggtaattttagttatttaggaggttgaggaaggagaattgtttgagtttgggaggtgaaagttgtggtgagttgagattgtattattgtatattagtttgggagatagagtaagattttgttttaaaataaaataattaaaaaattaaaaaggtttagtttgggtaatatagtgaaattttgtttttatagaaaatttttaaaatattagtagggtattgggtatagtggtttatatttgtaattttagtattttgggaggttgaggtaggtgggttatttgtggttaggagtttgggattaggtaggttaatatggtgaaattgtgtttttattaaaaaataaaaattagttgggtatggtggtaggtattagtaattttagtatttaggaggttgaggtatgagaattgtttgaatttgtaaagtaggggttgtagtgaattaagatggtgttattgtattttagtttgggtgatagaataagattttttaattaaaaaaaaaaaaaattagttgggtatggtgttgtgggtttgtggttttaggtatttaggaggttgaggtgagaggattatttaagtttgggaggttgaggttatagtaagttaagattatgttattatattttagtttttgtgatagagttagattttgttttaaaaaaattttaaaaagggtaaattttggtaattttatatagtttaatttagtataaggtggttgtaataattaaatgagataaaatggtgttaaattggaagtattatagtatttttgttaataatatagggttttagaattagtttttttgagtttaaatttaggttttattattttttagttatgtagttatgggtaagttatttgatttaattgtgttttagttttatttatgatatggagatataggataattagttttttatgtgtaattttgaaatttaaaaagttttgtaaattaaaagtttgggggtaaatttatttggtagtaaattttgatttgaggttatttatagtttatattttgtattttttttatttagtatgaataagtatgtaagttttattgtatgtttgattttagtatgtttttttagattttttgggggtgtttatgtatgttggtgggggaaagagattaatttttaaatattattttaaatagttggttttattgtgtttgtttgggtagtatatatattaaaattggaatgatttttgtatagggatgaaatgtaaatttgtgaagtatattgtattttttttagtatatattatttttggtaatattttttttttttttttgagagggagttttgttttgttgtttaggttggagtgtagaggtgtgattttggtttattgtaagttttgttttttgggtttatattatttttttattttagtttttttagtagttgggattataggtgtgtgttattatgttaggttaattttttgtatttttagtagaggtggggttttattgtgttagttaggatggttttgattttttgattttgtgatttgtttatttttgttttttttttgaagtgttgagtgttgggattataggtgtgagttattgtgtttggtttttgttttttttttttagattgattttattatttgtttagtaaaggagaattttttggtagaatagtttttaagaataaggtaaataattaattttatataggtttttattaatgtatagttgttgattgtgattggtttttggtaatttggattttataatttggataaggggataaataattgtttgttttttattattttttttgaatttgaatagaatttttttatttttatagttttttagtttttttttttttttttttgagatggagttttgtttttgttgtttaggttggagtgtagtggtgtgattttggtttattgtaaatgttgttttttaggtttaagttatttttttgttttagttttttaagtagttgggattataggtgtatgttattatgtttggttaatttttggatttttagtagagatgggggttttattatgttgattaggttggtttttaatgtttgattttaggtgatttgtttgttttggtattttaaagtgttgggattataggtgtgagttattgtgtttggttttttatagttttttagttttttaaaatttgaaaaattttgtaaagatatatttgggttaaagggtttagataatggattgtggtttttaagtatttatgttataggttattgagaggattgatttagttattagatgtaaaatgttgggattagtgtttggtaaaggaaaattttgtatagttgtaggtttttattatatataatagtattgttaatgaatgttattataatatttatttagtgtttattaagtgtttattttatataaattttgagaatataatgtgaaggtgaattgttgattaaagtttggttttttttgttttgtttttttgtgaaaatgttttaatggtaggaggttatgtgagtgttggatgtgtttttttttgtgagtttttttttgaggttttttgggtttttttggttatttttgtttgggtggtgtgtgtttttgttgtttttgtttttgttttagagaggtagggttttttgagtttgttagttttgtggttgtaattaattttgggttggagtgttttggtttggttagttttgtggtgtgagggaaggggagtttagtagttttttgtgtggggtttaggtgttggtggtagggtgggttttttattgttagtgtgttagttttgtttttatttattagtgtgttagttttgtttttttttatgttgttgtgtgtttgggggtggggtttggtgtgtattgtttgtgtatggtgaggtgtttgttgattggttattggggtttgggtttttttggtggagtgtgtttttttttagattttttgttagtaggagttgtgtggtagatgtggtgtttttaggagttttgtttgatagaatggttgggttttgttggttgttggtatgttgtgatagagtattttgtatagttttttttttaagtttttggtgttgagtgatgttaataaggttttggttagggttttatgtgaaggtggttgtgttgttgttgtttttggggtttttttttttttaggtggggatgtggtttggagtgaggttgggtttgggtttaggtttttggtgtgttttgtgttattgtttaaggtgaagaattttaatggagggttgtggagattggtagtgtttgttgtttttattaggtagtggggtgggggtggggttgaaggtgggggtatagtggtggggtgtttggaatttggtgaggggaggtttgtatagggggttgggggggtgtatggtttggttttgggtttggaggaggtggggttgtagagttggtttgaatgagtgtaggggttgagtttggagtatttgggggtgtagtttgtaaatagggttggaggagagaggttgtgtaggaagagggttgtaggggagatgtggagagtttgggttttttggagggaggagatgtgttttgttaggtgggggtgttgggttaaggaaggggtgatgtgtgtagttttgggtggggagggggtttgggaggtgggagtattgggggtggggtgagaaggggaaggtgtttggtttatttggtgggtggggtggggggtggggtggtgggaaggaggaatgtttgtgggaggttgaatggggagagtttggtggtgtggggtgtgaaaggaggttttttggttggtgtggagatagtgagttggggttttagtagttgattgaggtagatatttagaggtagttaagagttgtggttgttgagatgttttggggatggtgggtttttggtttaggtgaggggttgttgagggggtgggttatgagttgtgagtgtgggggggtgtgttattatggggattgtggggtttaattgggtggggtggggttgtggggagttgaagtgttgggatttggttgggttttttggtaggtaggttgtatgtgtattgagatgaagatagaatattttgatgtatgtggaaatttgtgttgagtggaaaatattttattttatgaaatagtgtaatttttatggggtattattgggtttttagaggttttaattgggtgttggataaagatgtgtggatgtgagtgattttggggaagtttgttgggagttgtttttattttatgggtagttaagtgttttttttttttttttttttttgagagagagttttgtttaagtttaggttggagtgtaatggtgtgattttagtttattgtaatttttgtgttttggttttaagtgattttttagttttagttttttgagtagttgggattataggaatgtgtttttatattttgttaattttgtatttttagtagagatggggtttttttatgttggttaggttagttttggaatttttgattttaggtgatttatttgttttggttttaaagtgttgggattataggtgttagttattgtgtttggtttgtttagggttttttatttgggtagttggtgatattttgaaaagtttgtttttgttgtttgttagatatatatatatgtattttgagatagagttttgtttttttgtttaggttagagtgtagtggtgtgtttttggtttattataatttttgtttttggattaagagattattttgttttagttttttaagtagttgggattataggtgtgttttattatgtttggttaatttttgtatttttagtagagatgggttttattatgttggttaggttggtattgaatttttgattttttgattggtttgtattggtttattaaagtgttgggattataggtatgaattattgagtttggttgtttgttagatattaaatataaagtttaatggttgttatttgaataaatgaagaaataaaggtttagaaaaaataatttatttaagataagagttagtttgtgttttttgtttggttttgttttgaaatggagttttgttttgttgtttaggttggagtgttgtggtgtttttttggtttattgtaatttttgtttgttgggtttaagtgatttttttgttttagttttttgagtagttgggattatgggtgtgtttattgtggtttggttgattttttattatggagttttattatgttggttaggttggttttgaaattgttgattttaagtggtttatttattttagttttttaaagtgttgggattataggtgtgagttattgtgtttggttgttagttagtggttttgagtaatggattttaaatttatttaaatttagtttaaagtgttttaaaggaattttgagatttttttaagtgtaattatagtgttatttttgtttaagtgatttttttttgtagtttaaatatatatagttgtgtattagtagaatatgtttgtggggaatagagttagtatttgtaataataaatttttggttagaaaagtatgatgtattgtttatttgagtatgaattgattgttgaatttaaattaaatgggtgtatttattgtaaggatgtattttatatttatattgaatagtgtatgttatttgttttttgaggttgagtttaagagatttgtaaaaataaaatgtatatattttattttttgttatggagaggattttagggtatttaagaaagatgggtatttgatattaggtttttaaagaaattgtagtgtttagattattttgttgagtatagtattaggtattatggattttggatataattatgaataggataaagtaaagaggtaattgtagattttaagtggaaaggggatggagaggatgtgggttaggttaggtttttagttttgtaaattgaaattagaaggataaataagtttagatagattatagtgagagtgggaagttggtttaggaagaggaaggtttgtaaattgtgggtaggatgaaaggaggaggagggagtattggagaagttaagtagagatttaattatgaatagtttgatgagttatagagatatttggatttattttatgaattatttaagttttaaaatatgttgagtgtattttttttttttttgagatggaattttatttttgttgtttaagttggagtgtagtggtgtggttttagtttattgtaatttttgttttttgggttttagtgatttttttgttttatttttttaagtatttggtattataggtgtttgttattatgtttagttaatttttgtgtttatagtagagatgggttttattatgttggttaggttagttgtgaatttttgattttaggtgatttatttattttagttttttaaagtgttgggattataggtgtgaattattgtatttggttgtgagttattgtgtttgtttgagtattttttaatgtttgttatttagatttttttttgtgttgaagtgtttgttttttgttgtttttttttttttttttagttttttgttatttgtgtgtgatataaatgtttttttttataatgagtttttttatttagtttatggttttgttgttgttgttgaataatagaggttttattttgttgtttaggttggtgttgaatttttgtttttaagtgatttttttattttagttttttaatttgttgggattataagtgtgagttattatatttagttttatggtattttttgatgaataaattattgattataatgtggaatttgtttttttattttttttgtggttagtgtttttataggttttatttaagaaatttatagggaggttgggtgtagtggtttatgtttgtaaatttaatattttgggaggttaaggtaggttaatatggttagattttgtttttttaaaaaataagaaaattagttaggtatggtggtgtgtgtttgtagttttagttttttgggagattgagatgggaggattgtttgagtttaggaggttgaggttgtagtaagttaagagattatgttatgtattttagtttgggtggtagagttagattttgtttgttaaaaaataaaataaaagttggtgaaaatgttgattatatattttaggaataattagtaattgatattaaaattatgggttaaagagaaagtaaaaataatgtgattttaaattagaatttaaaagatttgtttagtgtatgtttagataaagttattatttattatattaaagttttaatatttattttgtgagttgttagtttttttttttaatatttttttttattgttttaaaaaattttaagaatattggatatttaagatttatttaaagttttaaaagtatttgtaaaattttaaaattataatttaaggtgtttttggagggtaggagtaatggtggtaggtagtgttttgttttgttgtttaggttgaagtatagtggtagattttggtttattgtatttttgatttatttggtttaagtgatttttttattttagttttttgagtagttgggattttaagtgtatattattttatgtttggttaatttttaaatttttttgtagaaataaggttttattgtgtagtttagatggttttgaatttttgggtttttaagagatttttttaaagtgttgggattataggtgtgagttattatatttggtttattttggtatttttgaaaattgtaggattattatggataaaattttaaaattatttttaaagaatttaggtttatatataaaaaaaatttggtttgttagtagtgagtgaagaaaaattttgagaaatgtttaaaatttttagttttgttatataatatattttattatttgtttaattattttttttgatttagaaattagttttttgggtttaggatgtttagtggtattttttttttttaagttttttagtattggaggaattgtatattagtaaaatttttagttttagtattttatagtttattgttatttttttttttttatttttttttttttttttttttttttttttttttttttgagatggagttttgttttgttatttaggttggagtgtagtggtatgattttggtttattgtaatttttgttttttaggtttaaatgatttttttgttttagttttttgagtagttgggattatagatgtttgttattatgtttagttaatttttatttttttagtagagatggggttttattatgttggttaggttagttttgaatttttgattttgtgattaatttgttttggttttttaaagtgttgggattataggtgtgagttattgtgtttagtttttttttttttttttttttttttttttttttttttgagatggagttttgttttgttatttaggttggagtgtagtggtatgatttgggtttattgtaatttttattttttgggtttaagggagttttttgttttagttttttgagtagttgggattataggtgtttgttattatgtttagttaatttttgtatttttttagtagagatggggttttgttatgttggttaggttggttttgaatttttgattttaggtgatttgtttgttttgtttttttaaaatgttgggattataggagtgagttattgtgtttggtttagtatattgttatttttttttttttttttttttttttttttttttttttgtttttttttttttttttttttttttgtgagatggagtttgttgtttaggttggaatgtagtggtgtttttttggtttattgtaatttttgttgtttgggtttaagtgatttttttgttttaggtttttaagtagttgggattataggtttttgttattgtatttggttaatttttgtatttttggtagagatggggttttattattttggttaggttggttttgaatttttgattttgtgatttatttgttttggttttttaaagtgttgggattatagatttgagttattgtatttggtttatattgttattttttaatagtagagaaattatgtgttagattttgtaagtgtaatggtatataaaggataaaatgatgttgaaaaataaaattttttgtttaaatgtttatgtttttaatattttattttagaaaggaatttattttaaaattgataatggttggatttagttttttatataaattttttttttttagtgaggatgtatatttattttgtaaataaatggaagatattatttttttaattgtttgtttagaaatgaaataatttttttttaatgattttttaaagtatgagattttatatattatttaaaataatttatattgtattttatatatgataaagttttaaggtaatagtttttttttaagattaaagttatagttttttttttgtatttgagggggattggttgtaggatttttttgtgaatatttaaatttttggatgtttaagttttttatgagatgtagtatttgtatataatttatatatatttttttttgtattttatttttagattatgtataatatttaatagaatgtaaatgttttgaaattagttgtttagttgtattttaaattttgtatttttttttttttttttttgagatagagttttgttttgttgtttaggttggagtatagtatagtgattatagtttattgtatttttaattttttaggtttaagttgttttgttttggtttttttaagtgttgggattataggtgtgagttattatatttggttattgttttttattggttttaaatttttgatttaaaatttttaatttaggttggttgaatttggattggaatttaaggatatgtttgttgagtatattgtatttattttggaatataattagaatgtttaatttgtatgttaaaaatattttatttggttaggtgtggtggtttatgtttgtaattttagtattttgagaggttaaggtgggtgaattatttgaggttaggagtttaagatgagtttggttaatatggtaaaattttgattttataaaaaaaaggtaaaaataagttaggtgtgatggtgtgtgtttgtagttttggttatttaggaggttgagatataagaattgtttgaattggggaggtatgttatgtttttagttgttgatttgagtttttttgtagtttgtagggggagggtaatagagtattaggtagtttttggaatatataggagtgtaattggaaaaagattttaagtaagtttaatgaattagataatttatttaattagtaaattatgtaattagtatgttttataataatattgtgagttagattttgtttttgatatgtatatattatattgtataggtgttattaatttggagagtatatatagtgagtttatgttttttttttgttattagtattatattaaaattttgttatggtttttaaattttgattttgagaaagttttttattttaataatataattatatttgtgtttgtttttatagttaaatatgtattatgatattagtttgtatatattttttaaatgatttgaatatttgattttaaaaattattttagaatttttgtgttttaatattaatgttagaagatttggaattgtttatttgtaggtaattgtttttaaggaaatttgattaaatattaattaagttatgtatttttttttggtaatagt

SEQ ID NO: 312 - DNA, 12781 bp, Artificial Sequence
  chemically treated genomic DNA (Homo sapiens)
attgttgttaaaaggaaatatataatttagttaatatttggttaagtttttttaaaggtagttatttataaataaataattttaagttttttggtattaatattgaagtatagaaattttagaataatttttaaagttagatatttaagttatttaaaaaatgtatgtaagttgatattataatgtatatttaattatgaagataaatataaatatagttatgttattagggtgagaaatttttttagaattaaagtttaaaaattatggtagaattttggtataatgttgatggtaggaaaaaggtatggatttattgtatatgttttttaaattagtagtatttatataatatggtatgtatatattagaaataggatttaatttataatattattataaagtatattgattatataatttattaattaggtaaattatttaatttattagatttgtttggaatttttttttagttatatttttatgtattttaaaagttatttaatattttattattttttttttataaattatggaaaaatttaagttaataattgagggtgtaatgtgtttttttggtttaagtgatttttgtgttttagttttttgaatagttaagattataggtatatgttattatatttggtttatttttattttttttttgtagagttagggttttgttatgttggttaggtttgttttaaatttttgattttaaatgatttatttgttttggttttttaaagtgttgggattataggtgtgagttattgtgtttggttaaataaagtatttttaatatataagttaagtattttagttgtattttaaagtaaatatagtatgtttaataaatatatttttgggttttagtttagatttaattaatttagattaaaaattttaaattaaaaatttaaaattaataaaaaatagtgattaggtatgatggtttatatttgtaattttaatatttggggaggttgaggtaggatagtttgagtttgggaggttaaaggtgtagtgagttgtgattattgtattgtattttagtttgggtaatagagtaagattttgttttaaaaaaaaaggaaaaaaaatataaaatttaaaatatagttgaataattaattttaaagtatttatattttattaggtattgtatgtaatttagagataaagtataggggaagatgtgtataggttatatgtaaatattatattttataagggatttggatatttaaggatttgggtatttataggggggttttgtaattaattttttttagatataaagggaggattgtaattttagttttagaaaagggttgttattttagaattttgttatgtgtaaaatatagtataaattgttttaaatgatgtatgaggttttatgttttaaaagattattagaaaagaattattttatttttaagtaagtaattaaaaaaataatgttttttatttgtttataggataaatgtgtatttttattaggaaaaaaaagtttgtgtgaaaagttggatttaattattattagttttgaaataaatttttttttgaaataaaatattagaaatataagtatttaaataaaaaattttgttttttaatattattttattttttatatattattatatttatagaatttgatatataatttttttgttgttaagaaatagtagtatgggttgggtgtggtggtttaggtttgtaattttagtattttgggaggttaaggtaggtggattatgaggttaggagtttaagattagtttggttaagatggtgaaattttgtttttattaaaaatataaaaattagttaagtgtagtggtagaggtttataattttagttatttgggagtttgaagtaggagaattatttgaatttgggtagtagaggttgtagtgagttaagaaaatgttattgtattttagtttggatgatagattttgttttataaaaaaaaaaaaaaaaaaaaaaaaataaaaaaaaaaaaaaggaagaagaaagaaagaaagaaatagtagtatgttgggttgggtgtagtggtttatttttataattttagtattttgggaggatgaggtaggtagattatttgaggttaggagtttaagattagtttggttaatatggtgaaattttatttttattaaaaaaatataaaaattagttgggtatggtggtaggtgtttgtaattttagttatttgggaggttgaagtaggagatttttttgaatttgggaggtggaggttgtagtgagtttagattatgttattatattttagtttgggtaatagagtaagattttgttttaaaaaaaaaaaaaaaaagaaaaagaaaaagaaaaaggttgggtatggtggtttatgtttgtaattttagtattttgaaaggttaaggtgggttgattatgaggttaggagtttgagattggtttggttaatatggtgaaattttatttttattaaaaaaataaaaattagttgggtatggtggtgggtatttgtaattttagttatttgggaggttgaagtaggagaattatttgaatttggaaggtagaggttgtagtaagttgagattgtgttattgtattttagtttgggtgatagggtgagattttattttaaaaaaaaaaaaaaaaaaaaaaaaaagaaagaaagaatgaaagaaaagaaatagtagtaagttataaaatgttaagattaaaaattttattaatatgtagtttttttaatgttaaaaagtttgaagaaaaagagtattattaaatattttggatttaggaaattggtttttgagttaaaaaagataattaaataggtagtaaaatgtattgtgtaataaaattaaaaattttaaatattttttaaaatttttttttatttattgttaataaattaaattttttttgtgtgtaaatttgaattttttaaaggtaattttaaaattttatttgtggtaattttgtggtttttaagaatgttaaaataggttaggtgtggtggtttatatttatgattttagtattttgggaggattttttaagagtttaggaatttgagattatttgggttatatagtgagattttgtttttataaaaaaatttaaaaattagttaggtatggggtggtgtgtatttggggttttagttatttagaaagttgaggtgggaggattatttgagttgaataggttgagggtgtagtgaattgagatttgttattgtattttagtttgggtaataaagtaaaatattgtttgttattattgtttttgttttttaaaaatattttaaattatgattttaggattttgtaagtgtttttaaagttttaagtgagttttaaatgtttggtatttttggggttttttaagatggtggggaaaaatgttaagaggaaaagttgatagtttataaaataaatgttaaaattttgatataataagtaatggttttgtttaaatatatgttaaatagattttttgaattttggtttaaaattatattatttttgttttttttttagtttataattttgatgttaattattagttgtttttaaaatatataattaatatttttattaatttttattttattttttggtagatagggtttgattttgttatttaggttggagtgtatggtatgattttttggtttattgtagttttaattttttggatttaagtgatttttttattttagttttttaagaagttgggattataggtatatgttattatgtttggttaatttttttattttttggagagatagggtttagttatgttggtttgttttggttttttaaagtgttgggtttataggtatgagttattgtatttagtttttttgtggattttttaaataaaatttatagaaatattaattatagagaaaataaaaggataaattttatattataattaataatttgtttattgaaagatgttataaggttgggtgtggtggtttatatttgtaattttaataggttgggaggttgaagtgggaggattgtttgagagtaagagtttaatattagtttgggtaataaagtgagatttttattatttaataataataataaagttataaattaaatgaaagaatttattgtgaaagaagatatttatattatatataaatgataaagaattaggaaaaaaaaaagaaatagtaaaagataaatattttagtataagaagaaatttaaatgataaatattaaaagatgtttggatagatatggtggtttatggttaggtgtggtggtttatgtttgtaattttaatattttgggaggttgaggtgggtggattatttgaggttaggagtttatgattggtttgattaatatggtgaaatttgtttttattataaatataaaaattagttgggtgtggtggtaggtatttgtaatattaggtatttgagaggatgaggtaggagaattgttggaatttaggaggtggaggttgtagtgagttgagattatattattgtattttagtttgggtaataagagtgaaattttgttttaaaaaaaaaaaaaatatgtttaatatgttttaaggtttaaatgatttatggagtaagtttgaatgtttttgtagtttattagattgtttatgattggatttttgtttaatttttttaatgttttttttttttttttttattttatttataatttgtagatttttttttttttgaattagttttttatttttattataatttgtttaagtttatttgtttttttggttttggtttatagagttgagagtttagtttgatttgtattttttttgttttttttttatttggagtttataattgtttttttgttttgttttgtttatggttgtatttaggatttataatgtttaatgttgtgtttggtagagtgatttagatattgtagtttttttagaaatttagtattaaatgtttattttttttgaatattttggaattttttttataatgggaggtgaaatgtatatgttttatttttataagttttttaaatttaattttaagaaataaataatatatgttatttaatatgaatgtaaagtatatttttataataaatatatttgtttggtttggatttaataattaatttatgtttaagtaaataatatgttatgtttttttaattaggagtttgttattgtggatgttggttttgttttttataagtatattttattaatgtataattatatatatttaaattgtgggaaagggttgtttaaataagggtaatattataattatatttagaaaaattttagaatttttttaggatattttaaattggatttaaatggatttgaaatttattatttaaaattattaattagtggttgggtatggtggtttatatttgtaattttagtattttgggaggttgaagtgggtggattatttgaggttagtagttttaagattagtttggttaatatggtgaaattttatggtgaaaaattagttggattgtggtgggtatatttgtaattttagttatttgggaagttgaggtaggagaattatttgaatttggtgggtagaggttgtagtgagttgagaaagtgttatagtattttagtttgggtgatagagtgagattttattttaaaataaaattaaataaaaaatatgaattggtttttattttgaatgagttattttttttgagtttttatttttttgtttgtttaaatagtgattattaaattttgtgtttagtatttgataaatggttgggtttggtggtttatgtttgtaattttagtattttggtaggttaatgtgggttgattaagaggttaggagtttgatattagtttggttaatatagtgaaatttgtttttattaaaaatataaaaattagttaggtgtggtggggtgtatttgtagttttagttatttgggaggttgaggtaggataattttttgatttagagatagaggttgtggtgagttaagaatgtgttattgtattttagtttggataaaagagtaagattttgttttaaaatatatatatatgtatttggtaaatagtaaaagtaagttttttaaaatgttgttagttgtttggataaaaagttttaaatagattgggtgtggtggttagtgtttgtaattttagtattttgaggttgaggtgggtggattatttgaggttgggaattttgagattagtttgattaatatggagaaattttgtttttattaaaaatataaaattggtggggtgtgggggtgtatttttgtaattttgattatttgggaggttgaagttggggaattgtttgaagttgggatgtggagattgtggtgagttgagattgtgttattgtattttagtttggatttgagtgaaatttttttttaaaaaggaaaaaaaaaaaaaagtatttaattgtttataaagtgaggataatttttgataggtttttttggagttatttatgtttatatatttttgtttagtgtttgattaaggtttttaaaagtttagtggtgttttataaaaattatattattttataaaataaaatattttttatttgatatgaatttttatatatgttaaaatattttatttttgttttggtgtatgtgtagtttatttattgaaggatttagttggattttagtattttggttttttatggttttgttttgtttaattaggttttgtggtttttatggtgatatatttttttgtgtttgtagtttgtggtttatttttttggtggttttttatttaggttgaaggtttattgtttttaaggtgttttggtgattgtggtttttaattatttttaagtgtttattttgattgattattggagttttaatttattatttttgtgttggttgaggaatttttttttgtattttatattattggattttttttgtttggttttttgtaggtattttttttttttgttattttgttttttgttttgtttattaagtgggttgggtgtttttttttttttgttttatttttagtgtttttattttttaggttttttttttatttggagttgtgtgtgttgttttttttttagtttagtatttttatttggtgggatgtgttttttttttttaaaaggtttgaattttttgtgttttttttgtagttttttttttgtatagttttttttttttgattttgtttataagttatatttttaaatgttttagatttgatttttgtatttatttaagttaattttgtggttttgttttttttgagtttagggttaggttgtgtatttttttaattttttgtgtgagtttttttttgttgggttttaagtgttttgttgttatgtttttgtttttgattttatttttattttgttatttggtgggggtagtaggtgttattgatttttgtagttttttgttgaggttttttgttttgggtggtgatgtggagtgtgttaagggtttgggtttaggtttagttttgttttaggttgtatttttgtttggggaaggagaggttttgggggtagtggtggtatggttgtttttgtgtgaggttttggttgaggttttgttggtattatttagtgttggagatttggggaagaagttgtatagggtgttttgttgtgatatattgatagttggtaaggtttaattgttttgttggatggagtttttaaaagtattgtatttattgtgtggtttttgttggtgggaaatttggggggaggtgtgttttgttggaggaatttgggttttagtggttaattaataggtgttttgttgtgtgtgggtggtgtgtgttaggttttgtttttgggtgtgtggtgatgtggggaagggtggggttggtatattggtgggtaggggtggggttggtatgttggtggtgaggggtttgttttgttgttgatgtttgggttttgtgtggggaattgttgagtttttttttttttatgttgtggggttggttgggttggaatattttgatttggggttagttgtggttgtggggttagtaggtttggaaagttttgtttttttggagtggaagtgggaatagtgggggtgtgtattgtttgggtggggataattggggggatttgaaaggttttggaaaggggtttgtggggagaaatgtgtttagtgtttgtgtgattttttgttgttagagtatttttgtaaggagatggagtgaaagggattaaattttagttagtagtttatttttatgttgtatttttaagatttgtatagagtaggtatttggtaaatgttaaatgaatattgtaatagtatttgttagtgatgttgttgtgtatggtgaaagtttgtagttgtataaagtttttttttgttaggtattgattttagtattttatatttggtaattaaattgatttttttaataatttgtgatgtaagtatttaagggttatagtttgttatttgagttttttgatttaggtgtgtttttataggattttttaaattttagaaagttaagagattatgagaggttgggtgtagtggtttatgtttgtaattttagtattttgggatgttgaggtgggtggattatttgaggttaggtgttgaagattagtttagttaatatggtgaaatttttgtttttattaaaaatttaaaaattagttgggtgtggtggtatgtgtttgtaattttagttatttgggaggttgaggtaggagaataatttgaatttgggaggtagtgtttgtagtgagttaaggttgtgttattgtattttagtttgggtgataagagtgaaattttgttttaaaaaaaaaagaaagaaagttaagaggttatgagaataaaaaggttttatttaaatttaagaaagatagtggaagatagataattgtttgtttttttatttagattgtgaaatttagattgttggaaattagttataattaatagttgtatattggtaaaaatttatgtaaaattagttgtttgttttgtttttggagattgttttgttagaaggtttttttttgttaggtaagtaataaaattaatttaaaaaaaaaaggtgggggttgggtgtagtggtttatgtttgtagttttagtatttggtattttggggggggggtggaggtgggtggattatgaggttaggagattgagattattttggttaatatagtgaaattttgtttttattaaaaatataaaaaattagtttggtgtggtagtatatgtttgtagttttagttattggggaggttgaggtaggagaatggtgtgaatttgggaggtggagtttgtagtgagttgagattgtgtttttgtattttagtttgggtgatagagtaagatttttttttaaaaaaaaaaaaagaatattgttaaaggtggtatgtgttaagaaaaatatagtatgttttatgaatttgtattttatttttgtgtaggggttattttaattttggtatatgtgttatttaagtaagtatagtgaaattaattgtttgagataatatttgagagttggttttttttttttattggtatatgtaaatatttttagagagtttgggggaatatgttgaaattaaatatgtagtaaaatttatatgtttatttatattaagtagaaagaatatagaatatagattataaatagttttaggttaaaatttgttattaaatgagtttatttttaaatttttggtttatagagttttttggattttagaattgtatgtaagaggttggttattttgtatttttatattatggatgaagttgaggtatagttgggttaagtaatttgtttatgattgtatagttaggaagtggtggagtttggatttaaatttaaggaagttggttttggagttttatgttgttaatagaaatattataatatttttaatttaatattattttattttatttagttattataattattttatattaggttgaattatgtgaaattgttaaaatttgttttttttaaaatttttttgagatagggtttggttttgttatagaggttggagtatagtggtgtgattttggtttattgtagttttaattttttaggtttaagtaatttttttattttagttttttgagtatttgggattataggtttgtaatattatgtttagttaattttttttttttttaattgaggagttttattttgttatttaggttggagtatagtgatgttattttggtttattgtaatttttgttttgtgggtttaggtaatttttatgttttagttttttgagtgttaggattattggtgtttattattatgtttagttaatttttgttttttagtagagatatggttttattatgttggtttgtttgattttaaatttttgattataagtgatttgtttgttttagttttttaaagtgttgggattataggtatgagttattgtgtttggtgttttgttagtattttaaaaattttttgtagagatgaagttttattatgttgtttaagttggatttttttggttttttggttgttttgttttgagatagggttttattttgttttttagattggtgtgtagtagtgtagttttagtttattataatttttattttttaagtttaagtaattttttttttttagttttttgaatagttgggattattggtatgtgttattattgtttagttaatttttgtatttttagtagagataggattttattatgttggttaggttggttttaaatttttgattttaaatgatttttttgttttggttttttaaaatgttgggattataggtgggagttattgtgtttagttaagttggattgtttttgaagtataaatattaatatttaatttattttggtttaattgaatataatgttattttttttttgttgttgttgtttgtttttttggggatggagttttgttttgttattgaggttggagtgtaatggtatgattttggtttattataatttttgttttttaggttaaggtaatttttttgttttagttttttgagtagttggggttataggtattaatatatttagttaagttttgtatttttagtagagatggggttttattatgttggttaggttggttttaaatttttgattttgtgatttgtttatttttgttttttaaagtgttgggattatagatgtgagttattgtgtttggttgatgttatttttttatagggaggaaatggaggtttagaggggatgtgttagttgtaagaggttaagagtttgggttttgggttaaatggagaattgagttttgattttagttagttaagtagataatttggagtaattaatatttttttgaatttgtttttttgtttttgataaggatagtagtatttatgggttaaattttggaggttatagttagatgttttttataaattttattaaaagataagagaatatatgtattatgtggggatatttagatttttagaattggtatgaatgttatttggaattgaagatatttgagagttaatagatgtagaaagatgttgttttaaagttttttttatgtgattaatagtagaaatttttgggagtgaagttgttgtaaattttttttttaggggagttttagtggttagaaaaaaagataaagattatttgtatttgtaaaaataaatatttttattttttttttgtttttttagaaatttatttgttttttttatggaaggtttttttttttttttttttttttattaaatggtatatataaagtagattttgagatttaagaaaaaaaaagttgtataaatgttaaataatagttttttggatttattttttttttttgtgaatttttgtatgtatatttgaataaaagtttgtttttttttttttttttttttgagatagggttttattttgttgtttaggttgattttttagttttagttttttaagtagttaagattgtaggtgtgtgtttttatattttgataattttattttttgtagagattgggttttgttatgttgtttaggttggtttttaatttttgggtttaagtttttttttttatttggttttttaaagtgttaggattataggtttgagttattgtgtttggttttaaattgtttttagtttgtagtgtttaattaatatatatattttatgattatatatgggttattttgaaaattgaataaaaatattttttttttatatgtattttttttttaaatggttatatttagtaaattgtataataattaatggagttgttttggtttaggagatgtggtaggaaagtattaaggtagtaaatatattaggtgtttgggaatttttggtttattggttaagagttttgtatttaaagtttgtgtttatattttagttgagttgtttattaaattgtatgagtttgttgggtaagttatttagtttgtgttttagtttttatatttgtaaaatagggatgatattaatattattttttttatgggttgtgttaagtattgagtgaaagggtattatgaagtttttagtttagtgtttggtatgttatatgtatttaataaattggatagttatataaataaattattaattggttagggatagtggtttatatttataattttaatattttgggaggttaagatagaaggatgatttgaggttaggagtttaagattagttagtaatatagtg

SEQ ID NO: 313 - DNA, 1631 bp, Artificial Sequence
  chemically treated genomic DNA (Homo sapiens)
ggatttagaatatggggtggatttaggtagtggtgggaattaggtggatttgtttggattgaagtttttgttaggtattgaagttgtgaagttgtttgtgtagtaaagggagtttttggggggtgtttgagattttggtgttgtttgggggttgttggtagttgtgtttgttgttttttgtttggtgatttagttggtatttttggtggggttatgggggttagaggatagtgtggggggtggtgagtgtggttgttaagttttttaaggttttggagggataggatttgggtgtattttattggttgttatggtaatgtagtgttttagttttttgtgttttgtggtggagggaggtgtagttaattggaagtggtggagtttttggggatttttttttttttgttttatgttgtgtgtgggtgggggttaggaggtgtggggtggaggtggagtgtgggttgtggagatttggtgtttgtaggaggtttggtgtgtggtggggttgtatggggttatttttggagtagtattgtgagtagtggtgtgatagtgtggggtttttttttttttagaagagatgttatttatataaatttgatttttatgtggggtgtgggattttgtggggttttagttgtaggtgtttttgttgttttttttgggtgggtgggttggagaagaagtttatgtgggattttttaaaatggtgtatagggggattttagggttttatggttatttttttggattttttggaggtgttgtttagttatttttagttgttttgatgatttgttgtgggtttttttaggagatttgaaagtttagggtgggttgtgtgggtaatatttttgtttaggtttttggagggttttatgtggttgtttttggagtattttagagtgttagggttgtgggaaggggtgggtgtgtttttggaaatatgagtgtttgttagtattagtgtttggatagggttggggataaattagtttatgttgtgtatattgaatttatgtgtttgagtgagggtgggtgtgttggggagtgtgtttaagtggatagtgttgtatagtaatgtttatggggagttttaggagagtttggttatttttgtgtaggataattttttttttattatttgagttttgtgtttgtgggtaggatttttttgaattggggttgtgtgtttagaaatatgtatatgggagtgtttagtttaaagttttagggtttttgggatttgtgtgtttggggttggggttttaggtgggtataggtgggagggtgaatttgtgggtagggtgggtttttttttgtgggtttagtatttgtgtgtttttagtttaggtgtgtgggaggaaggtagtggtttgttgtgtagagttttgtgtgtttgtgaggtggtgttatagttgtagtagtgtttgttggtttgggttgttttagataagagtgtgtggaaagtgtggtggggttgagatgtgattaggatgtggggaggatggattagtaggatagattgattgggggtttggtgggtggagggtagtgtagttatgttttttttggatttgttgttagttgggtttggggtttttgatatgttttttaggtgggtttttgag

SEQ ID NO: 314 - DNA, 1631 bp, Artificial Sequence
  chemically treated genomic DNA (Homo sapiens)
tttgaggatttatttggggggtatgttgaaagttttgggtttggttgatggtggatttaggggggatgtggttgtgttgttttttgtttgttgggtttttggttggtttgttttgttggtttgttttttttgtgttttggttgtgttttagttttgttgtgttttttgtatatttttatttggagtggtttgggttggtgggtgttgttgtggttatggtgttattttgtgggtgtgtagggttttgtgtggtaggttgttgttttttttttgtgtatttgagttggaggtgtatagatgttgagtttgtggggaggggtttattttatttgtaggtttgtttttttatttgtatttatttgggattttgattttggatatgtgagttttagaaattttggggttttgagttgagtgtttttatgtatgtatttttaggtatatagttttagtttggaaaagttttgtttgtgagtatgggatttgggtggtgggggagaggttattttgtgtaggagtagttgagtttttttggaattttttgtagatattattgtatggtattgtttatttggatgtattttttaatatatttatttttatttaggtgtatggatttggtgtgtgtggtataaattgatttgtttttagttttatttaggtattgatattaataggtgtttatgtttttagaagtatatttgtttttttttgtagttttagtgttttgggatattttaggggtagttatgtagggttttttgggaatttgggtagaggtgttatttatatagtttgttttgaatttttgggttttttaaaggaatttatgatgagttattagggtgattggaagtggttggatagtgtttttggggggtttaaagaagtaattatggggttttagaatttttttgtatgttgttttgaagaattttgtgtggattttttttttaatttatttgtttgaaggaaataataggggtgtttgtggttgggattttgtaaggttttgtgttttatgtgaaggttaggtttgtgtgggtgatgttttttttgggagaaaggggattttgtattgttgtgttgttgtttgtagtattattttggaagtggttttgtgtagttttgttgtgtattaagttttttgtgaatgttggatttttgtggtttatgttttgtttttgttttgtattttttgatttttgtttatatatggtgtggagtgggggggggggggtttttgagaattttgttgtttttgattggttgtgtttttttttattgtggagtgtgaggggttggggtgttgtgttattatggtaattggtgaggtgtgtttagattttgtttttttgaggttttggagagtttagtaattgtgtttgttgttttttgtgttgttttttggtttttatggttttgttagaggtattggttgagttattgggtgaggggtagtgggtgtggttattagtggtttttgagtgatattaaggttttgggtgttttttggaggttttttttgttgtgtaggtgattttatggttttggtgtttggtggaggttttggtttaaatgagtttgtttgatttttgttgttgtttgagtttgttttatgttttggattt

SEQ ID NO: 315 - DNA, 9254 bp, Artificial Sequence
  chemically treated genomic DNA (Homo sapiens)
tgggggaaattgattttatgatttaattatttttatttgattttatttttgatatgtgaggattattataatttaaggtgagatttgagtggggatataattaaattatatgagtggatatgtaatatgagtgagaaataattttgtgattgtaatttagtaagatttttggatggttaatatagtataatttagagtatatggaggtgtgtatttttagttttttgatttttgggtatttagtaggattgtatttttttgtattttttaagtaaggtatggttatgtgattaattttagttaataatatgtaaatataataaaaagtgttatttttaggagggagtttttaaagttaatgtgagtttattatgtttttttttttttgttaaattgatgtgatgattgttgaagtatgtattaagatgaaattttttttagattaggtttttaaatgagtatattaagtagagttttgtgaagttgaatatgtagtatgagtaaaatataaaatttatttttaagttattgaaattttaggattgtttgttatggtagtataatttaaattattttgatttatataaaaattggtttttagatatgggttagtgtaataataataataagtataataataataaaattaaataattatttagagggtgataattaagaatattgttattagaagttgaagggatggtgatttgtttggtaaatatattatttgtgataatgtagaaggtagattatgaatttgatgaattaaagaaaaggattgtaaaatagagagtgagtagtgtgtgttggtggttgttggatgtattttgaaagttattataagttatttaaagatgaatttagaaaaatttggtttgtttgtaattaggaatgaaatggaatagagaaaatttataaatttagggatttatattgttagaagaggtaattgttttttagttttgattggtaaaatataaaattaagaaatatttttagtaagaaaggatttggaagaaattaagttttgaagtaaggattaagttataaagtatgaatttattattaaaattttaggataggaggttgaggaggatggattatttgaggttgggagtttgagataagtttgattaatatggagaaattttgttgtttttaaaaatataaaattagttgggtgtggtggtgtatgtttgtaattttagttatttaggaggttgaggtaggagaattgtttgaatttgggaggtagaggttgtagtgagttgagattgtgttattgtattttaattagggtaataagagtgaaattttgttttagaaaaaaaaaaaaaaggattaattaagattttatttagtatatatttttaattggataaaatggttttgggaaaaggaagaaaggtttaatttttttattaaaatttaataagtttaaagtgtttaaaattaagtgaagagtaagagagtgagatggtaaaagagagatagaggagttaataggtaggagagtaggaaagtaaagagatatggtaaattaaagaagtatgtttggaaaagaattttgtggttattgttatatggaatattttatattagatagataagaagtttatttatatatatttaagatttaatgttattttgtatttttttaatttttaaaagtttatttaaaagtatattttttaatgtttgttttagttgtggaaaaggaagattttttgagggtaaatttaggagttatggaaaataatgggtagggtagtttggtgttgtgattggatgggtttttaaggttgttttttttgaataaagaatgagggaattttattaggggaaggagagtagattaaatatttggtgaatagaaagggagatagagtttttagtgttattttttaaatatttttggagagttttttgagatatttggtaggattatagtgatttaaagaggtatggttatgtgattgttttggttaatgatgtatgggtagaagtgatgtgtgttataagtggatgttttgatagttatgatgttttgagttttttttttatagttaggatagttgtgaaaaggggtattaatatgaggttttttttagtttgagttttttagtgattataatgagtagagttattttgttaatttataatggttatgtagtagaaatgattaatttttattggaataagttattgatatgttagggttgtttgttagggtagtataatattgttttttttgatagaattgggagtgagagataaggttggagagagaaggagttggattgtgaaaagttttttttttaaggtataggaattggaatttttttgattgtaaggaaaagttaatgaaggtttttaagtaggggtgttaatatgaatagatttgttatttttttggatgaaatatgttattttttaatataaggagaagattagtttattaaattatatgaggtagagaggaatatatagaattttaggtaaaagatatatatttatgtaaagttttaagttttgaaatttttaaatataagagttttgaatggagttatagttagaggattaggtaagaaaattttttttatgttataagtgttattttttttgtagataattaatattttataagaaagtttgttagagtagagaaaatataaaggaatgtaatatagatttgaggttaatttttagttgtttgtgtgattttaataaagatatttaatttttttgggtttatttttttatatgttaaatttggataataatatatgttttttaagatagttgtggggagaaaatagtgtatttaaattgtttaggagaatgtttggtagataataagtgtttaatatatgaaattgatttttattattgttattaaaaaatatttagaatattaattttttgaatataatagaaaatgatttagggtaatagatagaggagaatgttttttttttgaggaagtaattggattttgttattattgtatatttatttattttattttttttttagtttagtgtttggtttatagtaggtttttagttattttttgtagattagtgaaagttaggtgagtgtttggagtgaagaaaagttggtaggttttttattgatattagttgttgttggtttttgaatatttaaagttgtaaatattttagggttgggggtaatgaatttaaggttgaattttaagtttagaagtagtgaagtttgaatttagaatttaggaatttaaattgttgtaggtttaattttaagttttagttttagatagaggtttgggaaagatttgatttttaatttggttttttttttttttttttttttgatgttttttataggaaagtatatttggttttgttaaattgtatttttatattttggtattttatttaggttttgtgaggatggaaattgtgaggtaggggagggaagtgggttgtttggttattatttttttagtgttgtaggtgattttgttatattaatttttggtagtttagtgaggtggatggtattggttttatttgtagatgagggaaatgaagtttggaggagttttgtgatttgtttgttttatattgtggtagtttggttatgaaagaattaggatttttgattttgggattttttttattatatatttttgtttttaaggggtggggggtggggggagaataaaataattgtggaaaaggaattatttatatgtgtttagtgttttttagaggttatttaggatatgtgtttattatttggttgggagtgtagagatttgaagtttaggttttattttgggttttgagtattattgtgtgattttatgtgagtgtttgttgttttttgggtttgtttttttggaagtaatttggtgtggatggagtgtgtgtgtgtgtgtgtgtgtgtgttatgttgtgtgtgttgtgttaagtgtgtgtgtgttgtttgggggtgggagggggagtagattaatattggggttttttgagttttggattgtttatatgtttgtttttatttggattttgttatttattaattgtgtttattataaaaattgtttttttgaggtaaagttgtgaatttttgtgtttttttttttatggttttggaggatgaagtggggtgtaatggagatttagttgagtgtttagttttgggtaatataaattttttggtttttatgagtagttagatgattttgtggattgttgtttttgaatttgattgagatgtaaattttggagtgtttttaatgtggggggttgatttttgggagattgtttttaaatttaagtttttttaggtttgtttttatttgggattttatagagttattttaagggtggtatttttgtttttttggaagtgtgggggggtggtagtgtatttggatttttagtttttagttttgtgtggtggtggttgttggtggatgattttgggttttataagtggggaaataataattattttttgtttgtatttttggtttaaaataattggttaggttttttggttttttgggtttttgtattttttgtatttttgtttgtagttgtgaatttgagtttttttttattagaggttgtgagtgtttgtttgtttgtggtagttattgttattagatagttaaattttaagatgttagtttataatgtattgggtgggttgggaaaaatggtttggggaggggattggggaagagagggttgagaggtgtgtggtaggggggagggtaggagaaagaagggtttgattgtaggagggtagtggagtattattttattttgtgagtttttgtgggtttagagaagaattttttagggtggagtttttatggtgatgggtgggtttgtttttttgagagtgatgtgagttaatgggaaggttttggggtgatattatgggttatttttaggggttgattggtagtagataagtgttgagtttgggttggataagggtttagagttgtattgagtgtggttgaagtagtgaggtgggagtggaggtgtgtggagttaggtagatagatagatatagttagttagttaggttggtagtatagtttgaattgtaaattttattttttttttattttttttttaattgtttagagttagtgtttgtggtttttgggttggtgttttgggagtgtttagagagtttggtttttagttgtttttgggaggagagttttgttgtttaggtgttgttgatagtggtggaaagtagtggtatttatgtgtttgttgggggaagttggtgagtggttgtagtagtaaagaatttttttggttgggaggattggagataagtggtagagttttggagttaatttttgtaagttttttttgtgttttaggtttttttatggtggtaaagattagaaggtggtggagagttatgtaagagaagaaggatgtgtgtttagttttgtttgtattggttgttgaatttgggtgagtgtgagttgtggttgttgggtgttttttttttttagtagtggaggaggggataagttgttggagtttgggtggttaagatttgttgttggttggttattgtagggtttgtattgatttgttttgtggggagagttgttgttttgggaagtgagtttgtttgtggattttgaggaattgttgtgtatgaagagtgtttagtgagtgattgtgattttttaaagttgggtagtgtgtgtgagttgataagtaagagtgtgggaggtattttaattaattttgtgttttttggagtgagttggtgaggagggtgtagtggggatgatagttagtgggtgtgtgtgtttttagagaaattttttttgttaaaggttttggggggtgtgggtgttttttgtttgttatagttttgttgtggttttgaaatttgtgtgtgtagtttaaattaattttatgtgaagtgatggattgttttatgattgtaaagatggaaatgattttttatgatgatgtttttaatgttttgttttttttgtttgagagtggattttatggttatagtaattttaagattttgaaatagagtatgattttgaatttggttgatttagtggggagtttgaagttgtatttttgtgttaagaatttggatttttttattttgtttgatgtggggttgtttaagttggtgttgtttgagttggagtgtttgataatttagtttagtaatgggtatattattattatgttgatttttatttagtttttgtgttttaagaatgtgatagatgagtaggagggttttgttgagggttttgtgtgtgttttggttgaattgtatagttagaatatgttgtttagtgttatgttggtggtgtagttggttaatggggtaggtatggtggtttttgtggtagttttggtggtagggggtagtggtagtggtggttttagtgttagtttgtatagtgagttgttggtttatgtaaattttagtaattttaatttaggtgtgttgagtagtggtggtggggtgtttttttatggtgtggttggtttggttttttttgtgtaattttagtagtagtagtagttgttgtattatttgttttagtagatgtttgtgtagtatttgtggttgtaggttttgaaggaggagttttagatagtgtttgagatgtttggtgagatattgtttttgttttttattgatatggagttttaggagtggattaaggtggagaggaagtgtatgaggaattgtattgttgtttttaagtgttgaaaaaggaagttggagagaattgtttggttggaggaaaaagtgaaaattttgaaagtttagaatttggagttggtgtttatggttaatatgtttagggaataggtggtatagtttaaatagaaagttatgaattatgttaatagtgggtgttaatttatgttaatgtagtagttgtaaatattttgaagagagattgttgggggttgaggggtaatgaagaaaaaaaataatatagagagatagatttgagaatttgataagttgtgatggagagaaaaaagaagtgtttgagaattaaagttaagggtatttaagttggattgggttgtgttttgatggtgtttttagtgtgtatgagtgggaaggatttggtgtgtttttttttggtgtggagttagggagtggttgtttgtgggttgttttgttttgtggatgggttgtttttgtgtgaatggaatgttggattttttgttaatattgattaagaattgtatggatttaatatttgattttatttagtattaaaggggggagggggagggggttataaattgtaatagagattgtagattgtttttgtagtattttttaagaatataaagtggggggagggttggggaggggtggtaggagggaggtttgtgagagtgaggttgagtttatagatgaattttttttggtttgtttttgttaattgtgtatgtatatatatatattttttaatttgatgaaagttgattattgttaataaatagttttatgtttttgtaagttattttttgtttgtttgtttgggtattttgtttagtgttgtttgtaaataagagatttggagtattttgagtttattatttgtaataaagtatataatttttttatgttttgtttttgaaaattttagaaaggatatttaagaaaatataataaattattggaaagtatttttttaattttttttttgtattatttgtagatattagttatttaggtggagttgaaagagttaagaatgttgattaaaattatttttagtgttttttattattaagtagtaaaaattgttttttattagattttagaaataaatgtatttgatgtatttgatgttatggttaggttatatttttttttttttagttatttatatggaattgtttattaaaggatagtgtgatgttttaggaggttggaggaaggggggttgtagtggagagggatagtttattgagaagttaaatattttaaagtttggattgtattaagtggtatgtgttgtgattatttataatgttagtagaaattttataataggtgtttatttttaaagtaggaattggtggtagattttataaaagatgtatttttttaatttggaattttttttttgataatttttagataaaaagatggtttttgtttatgaatatttataatagtatttttgttataataaatgtatttaaatattaataatagattttgaattgtttttttttattatttttttttttttaagttatatattgaagtttttatttttagttgttgaggttaatattgttgtaatttgaagtgatttgaaaattaagaagtaaagaatttaggaagagttaaattagaagttgtgatttgaatgaaatagttttttaattttattaattttttttttttttttttatttttatttttttttttattattttatttttaaataaatttttatgtttatggaaattaatagtttagtattttgggtttgtttgtagtttattttttaatttgtttttaaaataattaattttgtttaaatatagaataagttttaaaagatagtaatttaatattatggaaaagatttataagagaaaatatgaattagtattaatttaatgattatatgtgtaaattaaattttagttttggggaaatgggaaatttgaattttatttatagatataatttaggagattaataaggtagtgtttaataagggaataattttttgtttggttgttttttatattaagagttagtgtgattattaggtagtaaaagtaatttgatatttaggaatattttataaattattaattgagttagggttgtttgtttattagtagtgttttagtatttagtaggtttgggagtgttaatattttgtttgtggttgtaaatttaaatatataaagagtttttttttaggagtatatttaggagtggaagagattggataggtttgttagttttggattttttgtaataatattttttgaataaagggttattgggagtagagtttagtttgttaaattgaatttgttgatgttagtaatttggaaggtgagatgattttgattatatgtagaaatagtagagggataataaagtattttggggtggggttttgtggaagttaaataagagttaattagaaaaaataagtaggttggggaattaattatttgtaaagg

SEQ ID NO: 316 - DNA, 9254 bp, Artificial Sequence
  chemically treated genomic DNA (Homo sapiens)
tttttgtaggtaattaattttttagtttgtttattttttttagttggtttttgtttagtttttatagagttttattttaaaatgttttattgtttttttgttatttttatatatggttaaaattattttattttttgggttgttgatattggtaaatttagtttggtaaattgggttttgtttttagtaattttttgtttaagaagtgttattataaaggatttgaagttaataagtttgtttaattttttttatttttagatatatttttaaggagaaattttttgtgtatttggatttatagttataggtaggatattagtatttttagatttattgggtattagaatattgttaatgagtaaatagttttgatttaattagtggtttgtgaaatatttttggatattaaattgtttttgttgtttgataattatattggtttttggtatgaaaagtaattaagtaaaaaattgtttttttgttaagtattgttttgttgattttttaagttatatttgtaggtagaatttaagttttttatttttttagagttgaggtttgatttatgtatgtaattattgagttagtattagtttatgtttttttttgtgaattttttttatagtattagattattattttttgagatttattttatatttaaataaggttgattattttagaaataaattaagaaataagttatagatagatttaaaatgttaaattgttagtttttataggtataggggtttatttgggggtgaggtagtagagagagagatagagatggagaaagagggaaagaattaatgaaattgggagattgttttatttagattataatttttagtttgattttttttaaattttttgttttttaatttttaaattattttagattgtagtaatgttaattttagtaattaaaaataaaaattttagtatataatttgggaagaaaaaagtagtaaagggaagtaatttaagatttgttattggtatttgaatatatttattgtgataagaatgttgttataaatatttataagtaaaggttatttttttatttaggaattgttaaagagaagattttaaattggaaggatatattttttgtaaaatttgttattaatttttgttttgagaataagtatttattgtaaaatttttattaatattataaatggttatagtatatgttatttgatataatttaaattttgaaatgtttgattttttagtgggttgtttttttttattgtaatttttttttttttagttttttgaaatattgtattattttttggtaagtaattttatatagatagttgggggaggaggagtataatttgattatagtattaggtatattaggtatatttatttttaaagtttaatagagaatagtttttattgtttaatagtaagaagtattgagagtgattttaattgatatttttaatttttttaattttatttagatagttagtatttatagatgatgtagaaaagaggttaggggagtattttttaatagtttattgtatttttttaaatattttttttggaatttttagaaataaaatataaaaaaattatatattttattataaatggtaaatttagagtgttttaaattttttatttataaataatattgggtaggatatttaaataaataaataagaaataatttataaaggtatgaagttgtttattgatagtaattagtttttattaaattaaaaaatatatatatgtatatatatagttaatgaaggtaggttagaaagagtttatttgtaggtttagttttgtttttataaattttttttttgttgtttttttttaattttttttttgttttgtgtttttaaggagtattatagaagtaatttatagtttttattgtagtttgtaatttttttttttttttttttttaatattgaatgagattgaatgttaggtttatgtagtttttggttaatgttaatgaaaagtttaatgttttgtttgtgtggggatagtttgtttgtaaagtggggtagtttgtaggtggttgttttttggttttatgttaagggagggtgtgttaagttttttttatttgtgtatattgggggtgttgttaggatgtaatttagtttaatttggatatttttggttttagtttttggatattttttttttttttttgttgtaatttgttaagtttttaagtttgtttttttgtgttattttttttttttgttgttttttagtttttgatggtttttttttaaaatgtttgtaattgttgtgttagtatgagttggtatttattgttaatgtggtttatgattttttgtttaagttgtgttatttgttttttgagtatgttggttgtggatgttagttttgagttttgagtttttaaggtttttatttttttttttagttgggtgattttttttagtttttttttttggtatttggaggtagtgatgtggttttttatgtgttttttttttgttttgatttgtttttgggattttatgttgatgggggataggggtggtgttttgttgggtattttgggtattgtttgaggttttttttttagggtttgtagttgtgggtgttgtatgggtatttgttggggtaggtggtgtggtggttgttgttgttgttggggttgtgtgggaaaggttaggttggttgtgttgtaggagggtgttttgttgttgttgtttagtgtgtttgggttgaagttgttgaggtttgtgtagattggtggtttgttgtgtaggttggtgttgaagttgttgttgttgttgttttttgttattgaggttattgtgggagttattatgtttgttttgttgattggttgtgttgttgatgtgatgttgggtagtgtgttttggttgtgtagtttggttagggtgtgtatgaagtttttggtgaagtttttttgtttatttgttatgtttttggggtataggaattgggtgggggttggtgtggtggtgatgtgtttgttgttggattggattattaggtgttttagtttgggtgatgttagtttgagtagttttatgttgggtgaggtgaggaggtttgagtttttggtgtggaggtgtggttttaggttttttattgggttggttaggtttagggttatgttttgttttaggattttggggttattgtagttataaggtttgtttttggatgggaggaatgaggtgttgagggtattgttatagaaggttgtttttatttttgtagttatagaatagtttgttattttatgtgaggttagtttgggttgtgtgtataagttttggggttgtaatagggttgtggtaagtgggggatatttgtgttttttggagtttttgatagggaaagtttttttaagagtgtatgtatttgttggttgttgtttttgttgtgttttttttattagtttgttttagggagtgtagggttaattaagatgttttttgtatttttatttgttgatttgtgtgtgttatttggttttgaaaagttgtggttatttattgagtgttttttgtgtgtagtggttttttggagtttgtaggtgaatttattttttagagtagtggttttttttgtggagtggattagtgtggattttgtagtggttggttggtggtgggttttggttgtttggattttgatgatttgtttttttttttgttgttagggggagggggtgtttggtagttgtggtttgtgtttgtttaagtttaataattggtgtgagtgaagttgagtgtatgtttttttttttttgtgtggttttttgttgttttttggtttttattgttgtggagaagtttaagatgtaggaaaggtttgtaaaagttggttttgggattttgttatttgtttttggtttttttagttgggaaagttttttgttgttgtagttgtttgttgattttttttggtgggtgtgtgggtattgttgttttttgttgttgttaatagtgtttgggtagtagggttttttttttgggggtggttggagattaggttttttggatatttttgaaatattagtttgggagttataggtgttagttttgggtagttagagagaaggtgaaaagaaaataagatttgtagtttggattatattgttgatttggttggttggttgtgtttgtttgtttgtttgattttgtgtatttttatttttgttttgttgttttagttatatttagtgtaattttgagtttttatttagtttgagtttaatatttatttgttattagttaatttttaaaaatagtttatgatgttattttaaggtttttttattggtttgtgttgtttttaggggggtgggtttgtttgttattatggagattttattttagaagatttttttttgggtttgtggaggtttatgggatgaggtaatgttttgttgtttttttatagttgggttttttttttttttatttttttttttgttgtatgttttttggtttttttttttttggttttttttttgggttgttttttttggtttgtttggtgtattgtgggttgatgttttggggtttgattgtttagtgatggtggttgttgtgagtgggtggatgtttgtaatttttgatggaggggggtttaagtttatggttgtggatggggatgtgggggatgtagggatttgggaggttagggaatttggttagttgttttgggttaggggtgtgggtgaggggtggttgttgtttttttatttgtggggtttgaagttatttattggtggttgttattgtgtggggttggaggttgagaatttaagtatgttgttatttttttgtatttttgggggggtgggaatattgtttttaaggtggttttgtgaagttttaggtgggggtgagtttaaggggatttaagtttaggggtggttttttgagagttggttttttatgttgagaatattttgaagtttgtattttggttaagtttaggagtgatggtttgtggggttgtttggttgtttgtagaagttgagagatttgtattgtttgaaattggatgtttagttgagtttttgttgtattttattttattttttgggattgtgggggaaagggtgtgggggtttatagttttgttttggaggggtagtttttatagtgggtgtaattggtgggtaatagggtttagatgggaataagtgtgtaggtgatttgaaatttggggaattttggtgttagtttatttttttttttgtttttggataatatgtatatgtttaatataatatgtataatataatgtgtgtgtgtgtgtatatatatattttatttgtgttgagttgtttttgggaaaataagtttagaaggtggtggatatttgtataaagttatgtagtagtatttggagtttggggtagaatttggattttaaatttttgtatttttggttgggtggtgggtgtatattttgggtagtttttaggaagtgttagatatatgtaagtggttttttttttgtggttattttattttttttttgttttttattttttagggatgaaagtgtgtggtggaaagaattttgaagttgggaattttggtttttttgtggttaggttattatagtgtgaagtaagtaaattatggaatttttttgagttttattttttttatttgtaggtggggttggtgttgtttattttattgggttgttaggagttagtgtgatagggttgtttgtagtattagggaggtggtggttaaatagtttgttttttttttttgttttgtagtttttatttttgtagagtttggataggatgttaggatataagagtgtgatttggtaggattaggtgtatttttttgtgagaagtattgaggggaggaggggagggggaattgggttagaagttagattttttttaagtttttgtttaaaattggggtttgaagttggatttgtagtagtttaagtttttaggttttaaatttagattttgttgtttttgaatttggaatttagttttgggtttattgtttttagttttaaggtatttgtggttttgagtgtttagaaattaatagtagttggtattagtgggaaatttgttaatttttttttattttgggtatttatttagtttttattgatttgtagagggtaattgaaagtttattgtgagttaggtattgagttggggagggggtggggtaggtaggtatatagtgatgataagatttagttgtttttttaaggagagaatatttttttttgtttgttgttttgaattattttttgttgtatttagggagttggtgttttaaatattttttaataatagtaataaaaattagttttatgtattaaatatttattatttgttaggtatttttttaagtaatttaaatatgttgttttttttttataattgttttgagagatatatattattatttagatttaatatgtgaggaaataggtttagagaggttaagtatttttgttgaggttatataggtagttggaaattgattttaggtttgtgttatatttttttgtattttttttattttggtaaatttttttgtggagtattagttatttgtagaggaaatagtgtttgtggtatagaagaaatttttttgtttgattttttgattgtaattttgtttagagtttttgtatttagaaattttaagatttaggattttgtataaatatatattttttgtttaaggttttgtgtgtttttttttgttttatgtggtttagtaggttgattttttttttatgttgagaaatagtatattttatttaaaaaaataataaatttgtttatgttaatgtttttgtttggaagtttttattggtttttttttataattaggagagttttgatttttatgttttggagaaggggttttttataatttaattttttttttttttagttttattttttatttttagttttgttaggaaaggtagtgttatgttgttttaataaataattttaatatattagtggtttattttagtgaaagttggttatttttgttatatgattgttgtaggttggtagggtagttttgtttattgtagttattaaagggtttaggttgaaggaggttttgtgttgatatttttttttatagttattttgattgtggggaaggaatttggaatattatggttgttagagtatttatttatggtatatattatttttgtttatatattattggttaaagtagttatatggttatgtttttttagattattataattttattaggtgttttaaagggttttttaggaatatttggggaataatattaaagattttgtttttttttttgtttattaaatgtttggtttatttttttttttttggtggaatttttttattttttatttaagggaaataattttaaagatttatttagttatagtattaagttgttttgtttattgttttttatgatttttggatttgtttttggagagttttttttttttatagttaaagtaggtattggaaaatatgtttttaaataagtttttaaaagttggggagatgtagagtgatattaagttttgaatatgtgtaggtaggttttttatttatttgatatgaggtgttttatgtgataatagttataaagtttttttttagatatatttttttggtttgttatatttttttgtttttttgtttttttgtttgttgatttttttgttttttttttgttgttttatttttttgttttttatttgattttgagtattttgggtttattgggttttgatgggagagttagatttttttttttttttttagagttattttgtttagttgaaagtatatattgggtaagattttaattgatttttttttttttttttttgagatggagttttatttttgttgttttggttggagtgtaatggtatagttttggtttattgtaatttttattttttgggtttaagtgatttttttgttttagttttttgagtagttgggattataggtatgtgttattatgtttggttaattttgtatttttaggagtgataggatttttttatattggttaggtttgttttgaatttttgattttaggtgatttgttttttttggttttttattttgaggttttaatagtaggtttatattttgtgatttgatttttattttaaagtttagttttttttaggtttttttttgttaaaagtattttttgattttatattttattagttgggattgggaaataattgttttttttaatgatgtaaatttttggatttataggttttttttattttattttatttttgattgtaaataggttaaatttttttgagtttatttttgaatagtttgtagtaatttttagaatgtatttaatagttattaatatatattatttattttttgttttataatttttttttttagtttattaggtttatgatttgttttttatattattataggtgatatgtttattaaatagattattatttttttagtttttgatagtagtgtttttagttattgttttttaaatgattgtttagttttattgttgttatgtttattgttgttattatattaatttatatttaggagttaatttttatatgagttaggatggtttaggttatgttgttataataaataattttaaaattttagtggtttaaaaataaattttatattttgtttatattatatgtttaattttatggggttttgtttaatgtgtttatttagaaatttagtttgaagaaggttttattttgatatatgttttaataattattgtattagtttggtaggggaaagaaagtatggtgaatttatattggttttaaaagtttttttttaggaatgatattttttattgtatttatatattattggttaaaattagttatatggttatgttttatttaaagggtgtaggaaagtgtaattttattaggtatttggaagttaaagagttggaaatgtatatttttatatattttaggttatgttgtgttagttatttaaaaattttattgggttataattatagaattgttttttatttatattgtatgtttatttatatggtttggttgtgtttttatttaaattttattttgaattgtaataatttttatatgttaaaggtggggttaggtggagataattgaattatggggttagtttttttta

SEQ ID NO: 317 - DNA, 8244 bp, Artificial Sequence
  chemically treated genomic DNA (Homo sapiens)
ttttaaatatatttattattttgatgggttataataatttttttggatgttaatttttggggatgttaaaatatattagttttggtgggtttttttagatttatattatgtggtttggggttttagatgtgtttttttttaggttttggatagttttatatattttttttaggttttatagatttataggttattaatttgggttttttaattttaaagatgaagtttttggtttgtggtggttgtgttgattaatttgtttggttttttaggatgtggatagtgttttttttatatttaggtattgtttttaaaataagtggaatttttttgtataattttgaatattaattttagggttttttaagtttattgttttttgtatatgtttgttttattttgtgtttttttattttatttttgtgtttttttttgtttattttagtatgggatatttgttgttgggttttgtaaatttatttatattaatttgggttttttaaattttatatgttgaattttaagttttttatgatatttagtagggttggaaggttggaatttttagagtatgaaaattgttttttatatttttttttaaatttggttattatatttagagtatgttgaatttttttttgaattataaatgatttgttttttgattgtttgagttttataaaatggagggatttttttagtgattttttaaagttattgagaatgttgtgggtgtgtgagttataaagttttggggtattaatgtttatggttttatatgttgtttggttatgaattaggttttttaagatgtagatagtgttatttaggtttttggagtatattgagtagttattaggaggtgtttaagtgtgatttaggattttttaggtttttttaaattatatagggttttttgggtttttttgggttatattaagtataaaaggattttttgggtagagtttatttttatttttgttatgttaggtgttgttaatggttttagtttttaaatattttgagtattttttttgtattataatatattgattattaaataattttttgggttttaggagttttataataagaattttgtttttttaaaatttaggtattggtttgaaattttaatggttaggattatattggattttttttttggttttttatatttggatgttttggatgttgttttttaggttttttaggaatatttagtattgtttttggattataggatagtattgattttttgggttttaaataatttattgagttattttaaagttaagtaatattttttttaaatatattgtatattttttattataaaatttgaaaatttttaagttttaagatttaggaattttgaattttttttttttaaaatgtatatatggatttttaagttttttaaggattttgagtaatttttttagatttttagatttaaaaatgatttttttggagtttttaaattgtggtattgttttttagttttttaaagtaaattgagatttttttttttttataaaataattgaggttttttttttttttaatattgatttatgagttttttgattttatggtttttgttttgggtttttttatatttagaaaatgttttatggatttttaaagtatattaaaaaatgtttttgggttttaagaaattttaggtatggaaaaatttgtgatttataagttttttagttattaattaggtttttagaaatttagatattaaatttttattgggtaatttttatgtgttttaaaaatttgaaatgtgttttattggggtttttttaaatgtagatgatatttaggaaaatatatagttttttttttatttattaaaaataagttaatggaaattatttaaaaattagtatagaaaaataatattgattttatatttttttattttttattttgttttttttaaatgtattgattatattttaggtttttttaaaatttagatagtgtttttttttatttttgaagggtgttaaaatttttttttgaagttatagtaattatgaaggttattttttttttggttgttgttagtgtttaggttattaatttatatttttaagatgtgaaaattaattttagtttttttttaatatattaagaatgtgtttggatttttaaaatgtgttttttgtttttatttgttaattttatgtaatatggttttatggtaaaatttttaattttatatggagaattttttttaattatttttttttataaattggttttttaagttagttggtttttatttgagatttttttttttatgtttttaattgtatggagtaattttttttattttttaaatttgtaatttatttttttggagttttgagtttagttattaattatggtttttatattaatggagtttttggggtttttttttttaggatatttatttgttaagtttgtaaggtagaaagaattttgttttgtgttttttaaaatttgggtattgtttttggtttgttggttatttattgtagtttttttaattttgtgtatagtgggtattggttttgggtttttttgttttttatgaagtttttagagtaatttggatttgggaaatttttttttagtgttgtttaaatatatttgggttggttgtgtgtttttaggatgtggatagggagggtttttttgtgtttaggaaagtgattgggtattgtttttagttttttttaaatttgggtattgtttttgggttttttaatggattgggtgttgtttttggatattgaggattggttttggggttttgtttatttttagtagtgtttattgtttgttatagagtgtttgattgtttgttgtttgagtttttggtgtgtttgtggatgtagtttttagttttgtggtgagttttttgttgtgttgattttttttgtttttgtgtttttgattggtttttggtttgtatttgttgttgttttgttggtgttggtgtttgtttttggttgttgttggggaggttggtgtggggtgtgggatatggttgtggatttgtggttggtggttgtgtttgtttttgttgggtgttttgaaatttgtgttatttttgtttgtttattgtaaagattttatttgtggggaaagtggttggagggttttaaagtggggtgggtagggggttggggtgagggatgtggaggagaggtgtttttgttgggtggtaaagtgtttttagtttgtgggtttaggattttgttgggaggtgtgtgtggagtgtgggtgaagtgattgatggtggagtgaggggggtgaggggggttaggggggtgtgagattttgttggtggttttttttttttggttaggtttaggtggtggggggttggtggggtgtgggattttgtgtgtggtttttgatttggtaaaaattatagtgtttttttatattgtttaaattttttaggagatggtttttttagatttttaaattattgtggtggtttttgagattgaatttgtgtttatgtaagtttaatgtattgaggatggggtaattattatttagatattttgggtgggttgtaaaggtgagttatttagatgtattttggtgagtttggttatgtaggtaggatttgagttgtgttttttgttttgatttttttttttttggtggttggagtttttgtaggttttaagtttggtttagatttggtttggtgtagttggttttttgtgtgttttgtatttggtgggggttttggggttttggtgtggtattggggggtgtttgggatttggttgaggttttaagtgttgtgtggttggttttttttgttggggtaggtggtggttgtgtgttttgtttgagtttaggggtttttttagttgtaataattagtaaggattttttgatttagttttaagttatttgtatttgtatttagatggggtgtatttgtagtgtagttttttggtggggtgttgggagtttgtttgtttttgtttgtttggagattttagtttatgagtataggttgtttgggtattttagaaatttgggatggggtttttgaattttttagaatgggtatttagtatggttttggtgttttgtggttttttgttttttatttagttttgtttttgtgtattttttagtttttgtgattgttgtttttttttttggggttttagggtttttagtttgtattttttgttttgtttttggtttgggttgtgggggtgggttgggggtggggtgagggttttgtgggtgtttattggtgtgggtgtgaggttagtgaggtttgtgtgggttttgggttgtgggttggtgtgattataagagttgggtgtgggtgtttgtagtttgtttgttttttggtggagttgtgtgaggtttggttggttttggttttttttttttggttgtttttgttttttggtttatgtttgtttgtgttttgtttattagtgtttttattgggtaaggtggttttgtgttgatgttgtttgttgttttgttgttgatttttgttttgggtgttgtttgtggggttgtgttttgttgggtttgtggattttttgttgttttttttttatttattttaattttttttatttttgttttgtttgaggaggtggttttttttgtaggtagtttggtttgtaggttgttggtgttgttattttttttgtgttttttttttagttttttttttggtgtgtagttttgggttgtttttttttttgtgttgtgttttggagtggttttggtgttgttattgtttgttttttttttgaggtttgggtttgtgatggtagagggttttgttggtttaaattgagttgggtgtttgtggtttgggtgtagtttttattttgttttttagttattgttttttttggttttttgatgtggtgtttttttttttgtttttttgtgttttttgtgttttttttggtgtttggttttggtttttgtttttttttttgtaattttttttttgtttttttttgttttttttagtttttagtttttgatttttttttttttttatgtttgtttttttgtttttgttgaattaaagtggattaattatatgttttttgtttttttttgtgttgtttttttttgttgtgtgtttgtttgttttttgttgtttttttttttttttgttttttttttggttttttttttttatgtttattttgttttttttattatttttgtttttttttatttttgatataatagttgattttattttttgatatttttttttttttgaaaagtataatatttggtttgttttagtttgaagatagtttgttttttttggataattagatgaattttttttttttttttaaaaaaaagttatttttttgttttgttttgttgtatatttggtttttgtgatttggttagagtggtgttggtagaggagtgtttggtaggagggttaatgtttgttgtttggtttgtgatatgtagtagggaggtgggtggtagtgttgttggtttttaggtaagtggtgtgtgtgggttgggttggggttggggttggggtggtgtgggtttgtgttggatgtttggttttttttttgtttgtttttggtttggggtttgtggggtttggtggggtggttgagtttgggggggaggaggaggaggaggaggaggatggatggttgtgggttttgttttttgtgtggagttttgtgtttattttggtggtggagttgggggtggggtgggggtgttgggaagggttgagggaggtgtgaggtgtttgtaggggtgattttttggttggtttgtgggtgtagggggtgttgttttatatgtgtgatttgtgttttgtgggttttggtttttggggtgttgggtaatgaggaggggtgtggagttgtagaagtttattttggtatgttgatgtggtgttagtgagattgtgagaggaagatgggggtgggtggggttaggatggagaggggttgagttggtaggagttatggtagatgttatatttgtgatattttttttatattttttttggttttgtttgtaatatttttaaataggagttttgggagagggggagaggggttgttggtttgaggttaagaagggtagagtttttgatttggagagaggttgtggtttttgtttagtgggtagtgtggaagtttttatataaggaggtgggaaggagattttttttttttttattgttttgtgtagagatgagttgggggtgtaggatgggagtttatggtattttgttatgggatggtttagggtttttggttgggggtgtaggagagaagagattggttgggaggagggagagggtgggagtaaaggtgtgggggagtggttagtagggagaggggtggggggtagggtggagtttgggttgggaggagttggtttatatataaaagttgaggtattgattagtttgtaaattggatattagttttttttgtgaaagagatttttagtttttttttttttttttttttttttttttttttgttttagtgagttttttgttgagttgtaggtaattagggttgtggagtgaggatttttgttgttattttattttagtttgaggtagggtagtagggggtatggtttatgtttgggttttgggttttgtagttgttagtttgttgttttttggatagtattttttttttttttttttttttgtttttgtttttatttggtttttgtttttttatttgttttttttttttttgttttttttttttggttttttttttgtttagtttagggttttttttgggtttttatttgttttgtattgttgtatgttttttgttttgttttttgttggttttttgatttggatttttaagtttagagtggtggggtttgttgtggaagtgtggtgagggttagagtggttagttggtggagtgtgtttttagaatttggaagggggtggtagagggggtggtgagaggattggttagggtttagttaaggagatgattaaggaggtttttagatttttggtgtagttgtttattagtttttagagagggtatgtaaagttgtgtttttgttttattgtttgtttagttgtttatataatttattgtattaaaaatttttttgggtttgtggagtgaaggttggggttgtttgtttggagggttttattttttgtaggggtagggttaatttgttgtggtggtttttggttttttatttttgagtgggttaatttggttttgtggttttgtagtttgtggagggggtgtgttttaagattggtttttttttttagattgtagtttggggaatttggtgttggattttttaggtggtttgagttggtttttttagtttttatggggagagtttggtagtgtaaatagggagatgttttggaggtttttggttttattggtttgatttgaggtttggaaaggaggttttgggtgtgtgtgtgtgtgtttgggggtatttaaggtagattggagttggagaattgggtgattgggaaaataaggtttttagagtatgggtggtgtggttgtgttaattattggagtttttgatttaggtttggtttagttgtagattggaaaggtggaaaagttagggggaggggtggggttggtttagtaggattggtttgttgttttgagggtgatggtttttttggattttttttgtttagttgggggttgtggggaggaagggattggtttttttggatgtatatgttttgtaggggtggggttgtttgttattttggttggtgttggaggtttgagaagtggtgatgtgatgttgggttggttttgtttttatggtgttataggatggaggttaggttgggtgtttagtttgggtttttgtagttgtggatgttgttgagtttttgtaataatgattgtggagatggttattttttgtgtaaaattattagtgttttttgtaaatggaaggaattgggttttttttgtgtgtttttggatgttttattttgtatatggttttgtgtttttattttggtattatgatttgtgtgttatttttgtaataaaaataatgtttataggaaagttgtgtttttaatttttaattgaatttgtaggttggtaaatttggtttgggaggggtatttttggtttggggtttggtttggttgttttgtttatgttattttttttttgtttttaga

SEQ ID NO: 318 - DNA, 8244 bp, Artificial Sequence
  chemically treated genomic DNA (Homo sapiens)
tttgggggtgggagagaagtggtgtgagtggggtagttaggttaagttttaggttagaggtgttttttttaaattaaatttgttaatttataaatttagttgaaaattgaaagtatggtttttttataaatattatttttattataaaagtaatatataggttataatgttgaggtgagggtgtagggttatgtgtagaatgaagtgtttagaagtatatagaaaaggtttagttttttttatttgtaagaagtattagtaattttatatgaggggtgattatttttatggttattattgtaggagtttagtggtatttatagttgtaggggtttaggttggatatttgatttggtttttgttttatgatattatgggggtagggttagtttagtgttatattgttattttttaggtttttagtgttagttaagatggtagatagttttatttttatagagtatgtgtatttaggaggattagtttttttttttttataatttttagttgagtagggggggtttaggaggattattgtttttaaagtagtaggttagttttgttgggttagttttgtttttttttttggtttttttatttttttagtttgtagttgagttaggtttgggttaaggattttaatggttaatataattatgttatttatgttttagaaattttgtttttttagttatttagttttttaattttagtttgttttgggtatttttaaatatatatatatatgtttagagttttttttttaggttttaaattgaattagtaaggttaggggtttttagaatatttttttatttgtgttattaaattttttttgtgggagttggagagattagtttaggttatttgggaagtttgatattaggttttttagattataatttggaaggggaggttagttttaggatatattttttttataggttgtagggttatagggttgggttaatttatttgggggtgggaggttgggagttattatagtaagttggttttgtttttgtagaaggtggaattttttaggtgggtagttttagtttttgttttgtagatttaggggagtttttgatgtaataaattatgtgagtgattgagtaggtagtgggatagaagtataattttgtatgttttttttaaagattagtgggtagttgtgttgaggatttgaaagtttttttggttatttttttgattggattttggttagtttttttattgttttttttgttatttttttttaaattttaagagtatattttgttagttggttattttagtttttgttgtgtttttgtaataagttttattattttgaatttggaggtttgggttaggggattggtagaaagtaggataggaagtatgtagtggtgtggagtaggtgagggtttaggaaaagttttgagttgggtaaggagggggttgaagggaaggaatagaaagggaaggagtaggtgagggagtagagattaggtgggggtaggggtagaggaaaagaggggaggggggtgttgtttgagaggtagtgggttggtggttgtagggtttgaggtttaggtgtgggttgtgttttttgttgttttgttttaggttggagtgggatggtagtgggggtttttattttatagttttggttatttatagtttagtagaaggtttgttggggtaggaggaggaggaggaagaggaggaggaggaagttggaagttttttttataggagaagttaatgtttagtttgtaggttggttagtgttttagtttttatgtgtgagttgattttttttagtttgggttttattttattttttatttttttttttgttgattatttttttgtgtttttgtttttgttttttttttttttttagttagtttttttttttttgtatttttaattgggagttttggattattttgtagtgaagtgttatgggtttttattttgtatttttggtttatttttgtatagggtagtgaagggggggggggttttttttttatttttttgtatggaaatttttatgttgtttattgggtaggggttgtggtttttttttgggttgaaggttttgttttttttagttttagattagtagttttttttttttttttttgggatttttgtttggaaatgttgtggatagagttagagggggtgtgggggagatgttgtgaatgtggtgtttgttatgatttttgttaatttggtttttttttattttggttttgtttatttttgttttttttttgtggttttgttggtattgtgttaatatattagggtgggtttttgtggttttgtgtttttttttgttatttagtattttggaggttagggtttgtaaggtatgaattatatatgtgaggtggtattttttgtatttatagattgattgggaagttgtttttgtagatattttatattttttttggttttttttgatgtttttattttatttttagttttgttgttagggtgagtgtggggttttgtgtagggaatgggatttgtagttgtttgtttttttttttttttttttttttttttttgggtttagttgttttgttgagttttgtaggttttgggttgggagtgggtggaggaagggttgggtgtttggtgtaagtttgtgttgttttagttttggttttggtttggtttgtatatgttgtttatttggaagttggtgatgttgttgtttatttttttgttgtgtgttgtaaattgaatagtgggtgttggtttttttgttggatatttttttgttagtgttgttttggttgagttgtgggggttgaatgtgtgatggggtagagtggggggatggtttttttttggggggggggggagaatttgtttgattgtttagggaggatgggttgtttttgggttggggtgggttagatgttgtattttttgggggggaaaaggtattgggaaatgaggttagttgttgtattaaggatagaggggggtagagatagtgggagagatagagtgaatgtgaaaggggggggttgaagagagggtgagggggagagaggatagtgagaggtgggtaggtgtatagtgggagagaatagtatggagagaaatagaaagtgtgtaattaatttattttggtttggtgaaggtgagagggtgggtgtgagggggggagggagttggaggttaggagttgggggggatgggagggagtgaagggaaggttgtgggagaaagagtgggggttggggttagatgttaagaggggtgtggggagtatagagaagtggagggaagggtgttatgttgaggggttgggggaggtggtgattggggggtggagtggaggttgtatttggattgtgggtgtttagtttggtttgggttgatggagttttttgttgttgtgagtttgggttttgggagggggataggtggtggtggtattggggttgttttgggatgtagtgtggaaaggggagtggtttgaggttgtgtgttggggggagggttggagggggagtgtggggggggtgataatgttggtggtttgtgagttggattgtttgtggggggaattgtttttttgggtgaagtggggatggggggagttgaggtagatgaagaggaggtggtggggaatttgtaggtttggtggagtgtgattttgtggatggtgtttgggatgggagttagtagtgaggtagtgggtggtgttgatgtggggttgttttgtttgatggaggtgttggtgggtagagtgtgggtaggtgtgggttaggaggtgggggtggttggaaggggggggttggggttggttgggttttatgtagttttgttggagagtaggtgaattgtgggtgtttatgtttggtttttatagttgtgttagtttgtggtttagggtttgtgtgggttttgttggttttgtgtttgtgttaatgggtgtttgtggagtttttgttttgtttttggtttgtttttgtaatttgagttaagagtggggtggggggtgtgggttgggggttttggggttttgggggggggggtggtggttgtaggggttggggggtgtgtgggggtgaggttgggtggggggtagggagttgtagagtgttaaggttatgttgaatgtttgttttagagaatttaggggttttattttgggtttttggggtgtttgggtggtttgtgtttgtgagttggggtttttgggtaggtaggggtaggtgggtttttagtgttttattaggaggttgtattgtgggtgtgttttgtttgagtgtagatgtaggtggtttggggttgagttggggggtttttgttggttgttgtggttgagggggtttttgggtttgggtggggtgtgtagttgttatttgttttagtagaaggagttggttatgtggtgtttggagttttagttagattttgagtgttttttggtgttgtgttggagttttggagtttttgttaggtgtgggatgtgtggaaggttggttgtgttgggttgaatttgggttaggtttggagtttatggaggttttggttgttagaggagagaggattagggtgggaaatatagtttaaattttatttgtatggttgagtttattggggtgtgtttaagtagtttgtttttgtggtttatttaaaatatttggataatggttattttgtttttagtgtgttggatttgtatagatgtgagtttggttttgggggttattatgataatttgggggtttggggaaattattttttggagagtttgaatgatgtaagaaagtattgtgatttttattaagttaaaaattatgtataaaattttgtattttgttagttttttgttgtttaagtttagttaaggggaaggggttgttggtggaattttgtgtttttttggttttttttgttttttttgttttgttattaattattttgtttgtgttttgtgtgtgttttttggtggagttttaggtttgtgggttagaggtattttattgtttggtgggagtgttttttttttgtgttttttgttttagttttttgtttgttttattttgggattttttagttgttttttttatgaatgagatttttgtaatgagtaaatgaaagtggtgtggattttggggtgtttagtaggagtgagtgtagttgttagttgtaagtttgtagttgtgttttgtgttttatgttggtttttttggtggtagttggagatgagtgttagtattggtgggatagtagtagatgtgggttgagagttggttaggggtgtagaggtggaggggattggtgtggtggggagtttattgtgaagttggaggttgtgtttgtgggtgtattaggagtttaggtagtgagtgattgaatgttttgtggtaggtggtggatgttgttgaaggtgagtgagattttggggttagtttttagtgtttgggagtaatgtttagtttgttggaagatttggggataatgtttaaatttgggggagattgggggtaatgtttggttgtttttttggatatggggaagttttttttgtttatgttttgagggtgtgtggttgatttaagtgtgtttgggtaatgttagagagaaattttttaaatttgagttgttttggggattttgtaggagatagagaggtttgaaattagtgtttgttgtgtgtggggttggggaagttgtagtgggtggttggtgagttgggaataatgtttaaattttggggaatgtaaggtagagttttttttgttttgtgggtttagtgaatgggtgttttggaggaggggattttggggattttgttaatgtgggaattgtgattaatgattaaatttgagattttagaaaaatagattataggtttgggggatgagagaagttgttttatgtaattgggaatatagagaaagaggttttaaataggggttagttagtttgggggattaatttgtgaggaggggtagttaaagaaaattttttatatgaaattgggaattttgttgtagagttatattatgtaaaattggtagatgaaagtaaggaatatattttggggatttaaatatatttttggtgtgttagggggaagttgagattaatttttatattttaagaatataagttagtggtttggatgttggtagtagttggggaaaaaataatttttataattattgtggttttagggaaaggttttaatattttttagagatggaagaaagtattgtttagattttgggggagtttggagtgtgattagtatatttggggaaagtaaaataaaaaataaaaaaatataaaattagtattatttttttatgttaatttttaaatgatttttattagtttatttttggtaaataagaaaaagattatatatttttttggatgttgtttgtatttgggggagttttagtgaaatatattttaagtttttgggatatatggaaattatttaatggagatttgatatttaaatttttggaaatttagttagtagttaggaaatttataggttgtaggtttttttatgtttgggattttttgggatttagggatattttttagtgtgttttgggggtttatggaatattttttaaatgtagggggatttagggtagggattataaagttaggagatttataaattagtattaaaaaaaaaaaaaattttaattgttttgtgaagggaaaaaaattttaatttgttttggaaggttgggagataatattgtaatttgggggttttaggaaaattgtttttgaatttaaagatttagggaagttgtttagagtttttggaggatttgggggtttatatgtatattttaaagaaaggggatttagaatttttaggttttaggatttaggaatttttagattttgtgatagggagtgtgtagtgtgtttgaaggaaatattgtttaattttgagatgatttagtgggttgtttggagtttaagaaattagtgttgttttgtgatttgagggtaatgttgaatgtttttagagggtttggagggtagtgtttagaatatttaagtatgggggattaggaaaagggtttagtgtgattttggttgttggggttttagattaatgtttgaattttagaaaagtaagatttttgttatgaagtttttgggatttagagaattgtttaatagttaatatgttgtgatgtagagaaagtgtttggaatgtttgggaattggggttgttagtaatatttggtataatagaaataaaagtaggttttgtttaaggggtttttttgtgtttggtgtagtttagagggatttgggagattttgtgtgatttggggggatttggagaattttgggttatatttgagtattttttggtaattgtttagtgtgttttagggatttgggtggtattgtttatattttaagggatttgatttgtggttaggtagtatatagagttatagatgttaatgttttaaagttttgtgatttatatatttataatatttttaatagttttggggaattattggggaaatttttttattttatgaaatttagataattagagggtaggttgtttatgatttagaaaaggatttaatatgttttgggtgtaatgattgaatttgggggaaggtatgggaagtaatttttatattttgagggttttaattttttagttttgttgagtgttatgagggatttgggatttaatgtgtaaagtttagggaatttaggttagtgtgaatagatttgtgggatttaatagtaaatgttttatgttgaggtgaatgggaaggggtgtgggggtggggtgggggggtgtggaatggggtggatgtgtgtgggaaatagtaagtttaggagattttggagttaatatttaaaattatgtgggaaagttttatttgttttggaaataatgtttaaatgtggaaaaggtattgtttatattttggggagttaggtaaattggttagtgtgattattatggattaagggttttgtttttaaaattagggaatttgggttagtggtttgtaaatttgtgggatttggagggggtgtataaaattgtttagagtttgggagaaagtatatttggggttttaggttatatagtgtaagtttggaaaagtttgttgggattgatgtgttttgatgtttttggaaattaatgtttaagaaaattattgtgatttgttgaaatggtgaatatatttagaa

SEQ ID NO: 319 - DNA, 16842 bp, Artificial Sequence
  chemically treated genomic DNA (Homo sapiens)
ttttttaaagtgttgggattataggtgtgagttattgtatttggtttgttatttatgtatttatttttttttgagataagtttttgttatgttgtttaggttggttttaaatttttaggtttaagagatttttttaaagttttgggattataggtgtgagttattgtgtataattttgaagtggttaattttaataatatatttattttagtttaatatatttaaaattatattattttaatatgtaattattattaaaattattaatgagatattttattttatttttatttatttatttttttgagatggagttttgttttgttttttaggttggagtgtggtggtgtgattttggtttattgtaagttttgttttttgggtttatgttttttttttgttttagttttttgagtagttgggattataggtgtttgttattatgtttagttaatttttgtatttttagtagagattaggttttattatgttggttaggatggttttgaatttttgattttgtgattagtttattttggttttttaaagtgttgggattataggtgtgagttattgtgtttggttagtgagatattttatttgtgttttttttttttttttttgagattgagttttattgtgttgtttaggttgtagtgtagtggtataattttggtttattgtaatttttgttttttaggtttaagtgatttttttattttagttttttgagtagttgggattataggtgggtgttatgatatttggttagtttttgtatttttagtagagatgggggttttattatgttgtttaggttggttttgaatttttgattttaggtgattatttgttttggttttttaaagtgttgggattataggtaaaagttgttatattaggtttattttttttttttttgagatggagttttattgttgtttaaggtggagtgtaatggtaagattttagttttttgtaatttttgttttttgggtttaagtgatttttttgttttagttttttaagtagttgagattatgggtgtttgttattatgtttggttaatttttgtatttttagtagagatagggttttattatgttggttagattggttttaaatttttgattttgggtgatttatttgttttggttttttaaagtgttgggattataggtgtgaattattgtgtttggtaggtttatttttaatttttttaattttggaaatttagtgtgtagggtaggtatggtgttttatgtttgtaattttagaattttgggaggttgaggtaggtggattatttgaggttaggagtttgggattagtttgaataatatggtgaaattttgtttttattgaaaatttaaaaattatttagttatggtggtgtatgtttgtagttttagttattttagaggttgagataggagaattgtttgaatttgggaagtagaggttgtagtgaattaagattatgttattgtattttagtttgggtaatagagtgagattttgttttaaaaaaaaaaaaagagagttagtgtggagggaagtgtttttgttgggtttgggtgttttgtgggattttgaggaaaagtttgtattaggtagatgttgttttgtttttatgggtaaaggatattttaataaattgaggagtaaaatgtttttgtatgttttttttgtgtagatttgttaggaagagtataagaagaaatatttggatttttttgttaattttgtggaattttttaagaagtgtttggagagatggaagattatgtttgtaaaggagaagtgaagtttgaagagaaggtaaaaagtgataaagtttgttgtgatagggagattaaaaattatatttttttgaaatgtaagaaagggtaagaaaggaaagaaaaaggattgtaatgtttttagaaggttattatttgttttttttttgttttgttttgaatattgtttaaagattaaaagtggatatttaggtttatttgttgtggaaattgtaaagaaattgggtgaaatgtggtttgggtagttagttaaagataaataattatatgagtagaaagtagttaagttataggagagatatgaaaagggtattgttgtatattgtgttaagggtaaaagtgaagtaggaaagaagggtttaaagaagaataaattagaagatgaggaggaggaggaggagaaagaagatgaagatgaggaggaagagggtgaagatgaagaataaatggttattttttaatgatgtttgtgtagtgggtttgttttgttaagaatgtgaattttagtatagtttagtattagttttagtataaaattgtataaatttttgtatagtttataagattttttgtatagaaaatattttttttttttttttttttttttgagatagagttttgtttttgttgtttaggttggagtgtaatggtgtgattttggtttattgtaatttttgttttttgggttttggtttaagtagtttttttgttttagttttttgagtagttgggattataggtatatgttattatgtttagttaatttttgtatttttagtagagatggggttttattatgttggttaggttgtttttaaatttttgattttgtgatttgtttgttttggttttttaaaatattgggattataggtgtgagttattgtattttgtttaatgtttttaaatatttaatggtttttaaaaaatttattgtgtatggtagtatagtatatttgtaggaattagtattaatagtatattttgtgttttttaagatgttgtattttttaatattttgtaataaaattatgtgtattaaaaaaataaagaaattttgtgtgtagtttatatttatagtatatttttgtttaggtatttgagagaatgattaggaggggtttttggaggaggtggtttttgaatggagaatttatttttaaggattttgtttgtaatggttattaagtattttttgagttatttttatgtgttttgtagttttttgaaggggtgtgggatttattgatgttaattatttagtattatttttagattttaagaagttggggtgtgagttagtaattagtatagaaaagagatattaaaataagtttgagttggggagtgtttttttaattttagttttttggaagagattttttttttttttttgagatagagttttgtttttattgtttaagttggagtgtagtggtatgattttggtttattgtaattttttttttttgggtttaagtgattttttttttttagttttttgagtagttgggattatagatatgtatttgtaatttttattaaaaatataaaaattagttgggtgtggtggtgtatgtttgtaattttagttattggggaggttgaggtaggagaattgtttgaaattaggaggtggagattgtattaagatagtttgttttagttaaataatttggtgttagtgtaggaaaaggtggaaggtatggggttagtataggagggtttaatatttttaattttattaagttatattttggtaatttttgttttttatgagaagtttttgttgggtttgttttagtgttgttttgaggttttttttatgagttttgatagggtagaggttgttttgagtgttttttttttttttggtttaagagtggtttaaaagaaggatttttgattggaattggttattttgtgttattttttgatttttgattttgttttaaagggggatgtgggggaggggttttggtaggggtggttttgttttttttaggtttgtaagtttaggtttttgtttattgggtttagtttattttgtggttgtttagggaggttgttggtatttgtgatttatgattttttttttgagttttattgaggttatagttgtggttttgtttttttatgtttgttttttgttttttgtttgtgatgggtgtttttgaggattaatgagtgtgttgtatttattttttgggtggggttaagtgttgattaattgttgtttgggtgtttggttgggtttaaatgttttaattgttagtggtggtggggtgggtagagggttggggatggtaggtttaattaatgggtgggtatgttgtttttgtgaggaggtgtgttttgtggttgggtgtgtggtgtttgtggtggtgtagggagggggagggaggtaaataagatggtggtggtgtgttgggtgtggaagggggaggtggtttggggtgtttgtgagtgaggtgtggggtggtgaagggagtgtgggtggtggtatttgttgttgtggttttggatgggttgggttttttttgttgttttgttttttttatatgtgtggtggttgtggtgagggggatgtgttgtttggggtttggtatttttgggaattttttggtttggagtttgtggtttgtgttgttttggttgttgggagttttgtggagtttttgttgttgtgttgttttgtggattggatgttgagggtatttggggtggggtgtgtgtttgggtagatgtttgtggggaggggggtgtttgttgggttttggtgattattttgggggttgtgggttggtttggggggtgtttagtgtgggtttttgtgggtgttgggtagtgattagttttgagtggagttgttggttgtggtgggaggttttttggatgtttttagttttttgaatgtttgtttgggttggtgggagttggtgttttttgggaggtttgtttggttgtttgtggtggagtgtttgtttttgggataggtggtgggattggggtgttgttggagatgtttttagtgaagttgggttttttaggtgtgggggttttggggggtagtgatgttgtggatttggtttgtgggatgggtggtttggagaagattgtgtttggttgtgtttatatttgtttgtgggtttgaggtttttggaggatgatttagtattgaaaagttttggttggtttttttagggtttttgaggatgaagttgattttgattgggttgttttttagttttgaggtttgggttttattggaatttgtgtttgagttgttgttttggatttttggtgtttgttggtttgtagattttgtattgggtttggatttgtagttgggattgatgtgtagaataattgtttttgttggaagaagggttttttttttttttttggggtttttgttgtttttttttttttttttttttttgtaaaattttggagaagggaagttggaatataaggaaggattgtttatttgtggatttagggttggtggtgggattttaggattttgggtttagtatggaggtggtggatttgtagtagttgggtatgtttatggagggtgagttgatgttggtgggtatggatatgtttatttattgtattgattttattgaggttatttattagttgtgttgtaagtgggttaagtttattggtaagtatttgatgggggatttgttgggggaaggtttttatggtaaggtgaaggaggtgttggatttggagatgttgtgtaggagggttgttaagatttttaagaagaagaagttgtgaaggatttttaatggggaggttaatgtgaagaagtaagtatggtttgttggggttggggttgggttgggttagttatggtgttgatggttttgttttttttttttttttttttttttttttttttatttttttttaatattttgagttggatttgtttggtgtttgtgttttttgtgttagggagagtgtggttgggggtttgtgttatggatttttatttaggtaaggttagttgttgtagtggggtgtgtgtttgtatgggtttttggattttagttaaaatgttttggtagtgaaatttttttgagaagggagtggtttttaattttttaagattagttttttggtttttttagttgtttaaggagtagaggtgtttagtggaattagtttgtgtttgtttgggttttgagagtttgtgtgtggttgttaatatgttttttgtgtagtgtgtggttgttattggggttaggtgaaatgtgatttgtttattttgttagaggggaattttgggttgttaaaaataattgtttgtattggtttattagttagtaggagggaaatgtagtttttttttatttgttagggatgtgatgttggaagtatttttggtttttggggttggaagttttgtttgagggggattgtgttttttttttgaattgtatttggaagattttatttttttaattgatttttttaggtatggggttgttgttgggtattttggatgtttttgtatttgtgtgtggagaagtttttatttagggtagtattggttggtttgagttttttttagttggtgggggtggttgggggtgtttttgttttattgtagttagatatgttgtatttgttgttgtttggtgggttttgtttaggttttgttttttttttagtttttttaatttttaaaattttgttttttgtttttaagaaaggattttatttgttgggttaggttttgagggattggtaaggatattttgtgtagggtattatgattttggaaggaggtttggggaggggttgttgtggtgtttgtttttattttttttttgtttaggggttttggggtttttgttgtgtttgtttttattttttttttgtttaggggttttggggtttatgtatatttttttttttttttttttgagatggagttttgttttgttttttaggttggagtgtagtggtgtgaattgggtttattgtaagttttgttttttgggtttatgttatttttttgttttagttttttgagtagttgggattataggtatttgttattatgtttggttaattttttgtattttttagtagagatggggttttattgtgttagttaggatggttttaattttttgattttgtgatttgtttgttttggttttttaaagtgttggtattataggtgtgagttaatgtgtgtggtttttttttttttttttttttttttttttgagatggagttttatttttgttgtttaggttggagtgtagtggagtggttttggtttattgtaatttttgttttttgggtttaagtgatttttgtgttttagttttttgagtagttgggattataggtgtttgttatagtgtttagttaattttttttttttttttttagtagagatggggttttattattttggttaggttggttttgaatttttgattttgtgatttatttgttttagttttttaaagtgttgggattaaaggtgtgagttattgtgtttggttagtatgttttttaattagtatgtaggttgtgatatgtggaaattaggggtataggttttgaagtttgtattttggagttggagtagttagggttaaatgggagtggttgggaagggtgtgtttttatgaggtttttttgatgttttagtgtttagtttggatttgggtagaaggtgtggttagtgttttgagttagtggagtagttgtttgtgtttggtttttgtgagatgggttggttaggggttaggtagagtttgtgtttggtttttgtgagatgggttggttaggggttaggtagagtttgtgttgggggtagtaggtgttttttaaaggggttagtgatagttttttttttagtagtgagaaatttatgtttaggggttgggtgtggtggtttatgtttgtaattttagtattttgggaggttgaggtgggtggattgtttgaggttaggagtttgagattagtttggttaatatggtgaaattttatttttattaaaaatataaaagttagttgagtgtggtggtgtgtgtttgtaattttagttatttgggaggttgaggtagaatattgttggagtttgggaggtggagtttgtggtgatttgagattgtattattgtgttttagtttgggtgatatagtgagattttgttttaaaaataaataaataaataaataaataaataaataaataaataaatttggtttgagttttgataaatgtatatgtagggttaatgggaagatagatgttggagggtggaagtttgattgtgagagtgagttttttgtttttttgaatagttagtggaggaggttttgggagtttaggtgagtatttgaatggtagggtagagtttgagggttttggtggagataggtaagaaggttgtaggaatttagtttggtttagtgtttgggagaatgggagggaatatggaggtagggaggtagaggggttggtaggatttggattggattgtgtgttgtagttatttatagtttgattttattgttttgaagtgagtgatgtatttttattagtgtttagtgtttaattttattttggttttgagtgtgtaatggttttgtttttgtggggttttttgggatgaggggtgagttttgtttttttttggttattgtttgttattaggagttgttttgtttatagttgtgatttaggagttattgtattttttttagttttttgggtgttgttagggggtttttttattttgggagttggtgtgttttgattggaggttgttatgtgtagagtgttgttaaggagaaggggtgtttattgtttagttttgaggtttaaggttttggttagttttgttgttagtgttgtagggaaaaagttttttttgtgtgtgggaagtttaataaattttgtttagattgtgttttgtagtgagtgtttggaattttttagataagttttaggtgtttggttttttagttggtgtggaaagtgtgggtgattattaaggggggtgggttggggtagatggagttggtgtgagttttgttttttttttttttttttagaaaggtagttttggagtttatgttttgttttgtttttattggtaaaaagtataattttattagaaataggaaagttttaaaaagtattaatgagttaaaaagagggttgggtatgtttggttatgtttgtaattttagtattttgggaggttaaggtgggtggattatttgaggttgggagttagtttgattaatatggtgaaattttgtttttattaaaaatataaaattagttgagtgtggtggtgtatgtttgtaattttagttattttggaggttgaggtaggagaattatttgaatttgggaagtagaggttgtggtgagttaagattatgttattgtattttagtttgggtaataagagtgaaattttgttttgaaaaaaaaaagggttggggttgggtgtggtggtttatgtttgtaattttagtattttgggaggttgaggtggtttgattataaggttagaagtttgagattagtgtggttaatatggtgaaattttttttttattaaaaatagaaaaattagttaggtgtggtggtatatgttaataattttagttattttatttgaggttaggagtttaagattagtttggttaatatggtgaaattttgtttttattataaatataaaaattagttaggtgtggtggtgtgtgtttgtagtttagttattggggaagttgaagtaaggagaattgtttgaatttgggaggtggaggttgtggtgagttgagattgtattattgtattttaggttgggtaagtttaggagagaagagtgaaattgtgttttaaaaaaataattaattaaaataaaattagtgttataggttgtttttggtaggtagtgggtttttagggtggagtagggaagggttggaaagggttgtttgtgtttagtttgattttttgtgttttttgggggatagtatggttagttgttgttgtggagtttatagtggggttttgggggggggggtgtaggtagaaggttgttatgtttttttttttttttttattttagtgagagtgggtttgaaggtagggagtttgtttgttttgtggagtttttgtagaggtatttagggttgttgtgagtgtatagtttggtggtgttttatggttttgtttttttttgttatttttatttgttgtaaaatattgtgtttttgtattttttttttttatttgtttggaaatgtgaaaattattgttgttgtaggaaatgggtttagatttgggttgtggtttttttatttgtattgtttttgtggtgtttagttaggaggtgggaggtgggtggtatttagtgtgtttggttgtggtgatgattggtagatgtttggatttatggtaaagaggatttttgtgagttgggagttagttttggattttgtaggtttttatattttaggtggtttttatggggttttagtatttgttgaggtttttgtgttagttatgtgaggtttgggtgtttttgaggtttttgtttgtgtttttttttgggtagtgggagggagagttttgagatttagagggagtttaggggttgggtagttgtagaatagtgggggtaatgggtttattgggggttttgggttgtgtatatagtgggtttttggtgtttagttagttggggtaggtttggaatgttggttttttttttaggatttggggtgttgttgtagttgttggggaattagtgaggtggttggatggtttgtatattttataaatgttattgtattgtttaaattggatttaatttttttaatatttttttttttttttttttttttttttttggagatagggttttattgtattgttgaggttggagtgtagtggtgtaattatagttttgggtttaggtgatttttttgtttttaaggtagttgggattgtagatgtgtattattatatttgattagttttttgtagagatggggttttgttatgttgtttaggttggttttaaatttttagatttaagttatttgtttgtttgggttttttagagtgttgggattataggtatgagttattgttttgttatgtttatttttatttatttatttatttatttttgagatggagttttgttttgttttttaggttggagtgttgtggtatgattttggtttattgtaagttttgttttagttttttaagtaagttggaattataggtgtttgttattaagtttggttaattttgtttttgtatttttagtagagatggggttttattgtgttagttagtatggttttgattttttgattttgtgatttgtttgttttggttttttaaagttttgggattataggtttgagttattgtgtttggtttatttttttattttttattttatagagataagggtttgttgtgttgtttaggttggttttgaatttttgattttaagtaattttttttggttttttaaagtgttgggattataggtgtaagttatagtattgggtttaaagtttattttttttttttttttttttttttttgagatggagttttgttttgttatttaggttggagtgtagtggtgtgattttggtttattgtaagttttgttttttgggtttatattatttttttgttttagttttttgaatagttgggattataggtgtttgttattatgtttggttaatttttttgtatttttagtagagatggggttttattgtgttagttaggatggttttgattttttgattttgtgatttgtttgttttggttttttaaagtgttggggttataggtgtgagttattgtatttggtaaagtttatttttttaaagtgtgtaatttagtggtatatagtatattgatagagttgtataattattatttttattagtttttagaatatttttgttattttagaaggaaattttgtttttgttagttattattttttattttttttttagttttggtatttatgtattttttttttgtttttggattggtttgttttgaatattttatatgagtggtgttatatattgtgtggttttttgtgtttggtttgttttatggagtgtgttgtttttaaggggtatttgtgttgtggtttgggtttgaatttttttgttgtttatggttgtgttattttttagtgtgtggagggttatgttgtgtttgattgtttatttgtggttggatatttgggttgtttttgtttttgtttgtgaattgtggttgttttggtgtatgtgtgtttagttggtgtttttttagaatttttgagggttttgttttagttatattaggagggatttagggattagggtatgtgggtttggagttgggtgtttttgggtttttatgtgttttttagttttgttttgagttgtgggaggttggggtgagggttaggtttattttttttttgtatgatttgtttttaggtagatggaggtttttagttttatttttttgtgagtttgagtggtgtttatgatttttttttttattttttgttttgttaattaataagttagttaaatagtttatgttgtttgggtaagtttagtaggtttttaatgtggtattttggagtggttggtgatgttttaagagttgggttttttttttttggaggttttttttgttttttgttaagtttttaggttttgttgggtttttttttttgttttttttttggttggagatgttagaggaagtttggtgatttagagaagttgatgtgtatttattattttggaggtgattgttattaggtgggggtggttttatttttattttttttttggtataaattgggggatgtatgtgtttgtgtagaatgttttggttttttttaattaaatagataatttagtgttttttggtttatgttgatttgtttaggagtgtttgggtttttttatgttttagttgttgtgtgttttgttgttgtgaagtgtttttgttgaggtggaggtagggtagggtgtttttggtgagggtgagtttttttgtgtttgtttttttatttgtagaatgatggtttatggaggagatatggtgttggtaggtggtggttggtgtagggaggtttttaggagggagttttttatttttatttgtttttagggttgtgtagttttttgagtggtttttatgaggttttgaggttgtatgtaggttgagtttttggttttattgtttttttttagggttaggattgtgttggagtttgggtgggtgtggggtggtttttgtataggtagtaggaggtgggttagagtggtgttggatttgaaggtttgtggtttttttagttttattgaggaggttggaatagtgttttgggttattttttttgttggtagttggtttttgttgagggagggggtgtttttgttttttggtggagtattaggtttttggggtttgtgtgtttgagtatttggtttttgttgtttgaaaatagtattttttttgttttttggttattgtattttttttgaatagaaggtaagttttgttttttaggaatggtttgtgatttttattagtgggggaggttaggggtatatagagttttggggaataaggggatttggggttgagttgggttttttgggtttattttgagtttttttgagtagtttggtaggtaggaaggtgttgggttttggggtttttgttgagtttagttttatttttagtgttttttttaatgttttgggtgtttgttaggttgtggatataggttttggttagttttataaataattttgttgggttttgttgggaattggtgttattattatatagtttagagagaatggaaatatagggttttttagtgagtagattaggtttgtggtgattagtggaagtgggggatgtttttagggttgggtagtttgatagggtattgggtatagttaggggttggaattagttgtttattggttttgtttttgggggattgtgtttttttgtgttttgtttttattatattttgttttttttttattttgtttttttagtttttttttagattggtggttttttgtttaggtttagttttagtatagtttgtagttttggtagagtttaggttttggttttttgaggttgttttgagggtagtgagtaatgagttttgggattggtgtattgggagggaaaggtgagttaaggttttttgtaagaggtagttttgagttgggggtggggaaggttgggttgtgggatatttttgatattttaagttttttttttgagatggagttttgttttgttatttaggttggagtgtagtggtgagattttgattttttgtaatttttgttttttaggtttaagtgatttttttgttttagttttttgagtagttgggattataggtgtttattattatgtttggttaatttttgtatttttagtagagataaggttttattatgttggttaggttggttttgaatttttgattttaggtgatttattttggttttttatagtgttgggattataggtgtgagttattgtgtttggttttttagttgttttttatgttttatgtttgggttttttgttaagaattaaaaaagaaaaaaaaaattatggagatggaatttatatattgtataatttatttgtttatagtgtataatttagtggtattaagtatatttatatggttgtgtaattattatttttaattttagaatgtttggttattttaaaagtaagttttatttttattgtgttattttttattttttttattagtttttggttattttgaatttattttttggttttggattggtttgttttggatattgtatagaaatgggattttgttggttgggtgtggtgatttatgagagtaagagatttagattattttggttaatatggtgaaattttatttttattaaaaatataaaaattagttgggtgtggttgtgggtatttgtagttttagtgatttaggggttgagttaggagaaattgtttgaatttgggaggtagaggttgtagtgagttgagattatgttattgtattttggtttggtgatagagtgagattttgtttttaaaaaaaaaaaaataagaaatgggattttgttattttagtgttttttgaggttgaggtgggtagatgatttgagtttagtagtttaaatgagattagtttgggtagtatggtgaaattgtttttattaaaatataaaaattagttgggtatggtagtatatgtttgtagttttagttatttgtggggttgagatgggaggattgtttgagtttgggaggtgtattttagtttgggtgatagggaaattttgttttaaaaaaaaaaaaaaaagtgtattatatattgtgtgttttttagtgttttattgtgatatttttaaggtgtagttaggttgtggtttgagttagagttttattggtttttgtggttgagttttgttgagtgtgtggatgggttgtgttgatttttgtttgtggaagggtttttgggtggttttatattttggttgttgtgtgttttgttgttgtgagtattttgtgttttgtttttgtgtggtgtgtattgttttttagggtgtgtatttgggagtggagttgttggtttatagggtaatagatttttggagaagttgtagatgtttttatgtttatttattgggtgtgaggattttgttttttgttatttttgtttttgtttaatttttttttttatgagatagggttttattttgttgtttaggttggagtgtagtagtatgattataggtaattataggtttaagtgatttttttatttgagttttttgagtagttaggatttgaggtatgtatttttatatttggttaatttttgtatttttagtagagatagggttttgttgtgttgtttaggttggttttgaatttttgagtttaggtgatttatttgttttggttttttatagtgttgggagaaatgaagtgtttgtgatagggtggtagttgtagagggggttgtgttttttggtttgttgtgttttatttttgtgataggtaggtgggtgtggttaattgggtggtagttgtagagggggtagtgataggtgggtgggtgtggtaggattttataatgtttttttttgtggtgtttttttttttgtttgtttttttttatgggttatttttttagtttatttgtggtttattttttaaggagtgggatttttggagttgggagtttttggttgtgtgggattgtattgtgtgatggagttattattagggttttaatttattttggtttttgttatagtttgggttttatttgtgttattattgtagtagtttggtttttaggaagtaaaattgttattgagttataaagtttaattaagagtgttttttgggaggttgaggtgggtggattataaggttaggagattgagattattttggttaatatggtgaaattttgtttgtattaaaatataaaaaaattagttggttgtggtgatatgtgtttgtagttttagttatttgggaggttgaggtagggaaattatttgaatttgggaggtagaggttgtagtgagttgagattgggttattgtgttttagtttagggatagagtaagattttgttttagaaaaaaaaaaaagtgttttaattgtgttttttaaagtttttgttggttgatgatagattagagggtgttgtgtttttattttttattgttttgagtttggatgtgtggtttttgtagggtttttttttatagtattgtgaatttatagtttttttttagggaagggaggaggtatgttatttttatagggagatggggaggttgattttagggatttaggttattattttgatgttgggttggttgatatatttttgttttttttgttttagg

SEQ ID NO: 320 - DNA, 16842 bp, Artificial Sequence
  chemically treated genomic DNA (Homo sapiens)
tttgggatagagaggataggggtgtattagttgatttaatgttaggatgatggtttggatttttggagttggtttttttatttttttgtggaagtggtgtatttttttttttttttagagagaagttgtgagtttatagtgttgtgggaaagggttttgtaggggttatgtgtttaggtttagggtggtagggggtgggagtatagtgttttttagtttgttattggttggtgagggttttggaggatatagttaggatatttttttttttttttgagatagagttttgttttgtttttaggttggagtatggtggtttgattttagtttattgtaatttttgttttttaggtttaagtgatttttttgttttagttttttgagtagttgggattataggtatgtgttattatagttggttaatttttttgtattttagtatagatagggttttattatgttggttaggatggttttgattttttgattttgtgatttgtttgttttggttttttaaaggatatttttaattgagttttgtaatttagtaatagttttgttttttagaaattagattattgtaatggtagtatagatggagtttagattgtggtaggagttagggtgagttggagttttggtgatggttttgttatatagtatagttttatgtagttaagggtttttaattttgagggttttattttttggagggtgggttgtaggtgagttggaaggatggtttataggaaggggtaggtgaagaaggagatgttatagaaagagatattgtggggttttgttatatttatttgtttgttattgttttttttgtagttgttgtttagttggttatgtttatttgtttgttataagggtggggtataataggttagagagtatagttttttttgtagttgttgttttgttgtagatattttattttttttagtattataggaggttgaggtgggtggattatttgagtttaggagtttgagattagtttgagtaatatggtgaaattttgtttttattaaaaatataaaaattagttaggtgtggaggtatgtgttttaagttttagttatttgggaggtttaggtgggaggattatttgagtttgtagttatttgtgattgtgttattgtattttagtttggataatagaataagattttgttttataaaagaaaaaattaaataaaaataaaaatgatgaggagtaaggtttttatatttagtgggtgggtgtggaagtgtttgtagtttttttaaaggtttgttattttgtgagttagtagttttatttttaggtatatattttgaggaatagtatatgttatgtagaaatggagtatgagatgtttatagtagtaggatgtatagtagttgagatgtggaattatttaggggtttttttatagatgaggattagtatagtttatttatgtatttaataagatttagttataaaaattagtgaggttttgatttgagttatagtttagttgtattttgaggatgttatagtgagatattaaaggatatatagtgtgtgatgtatttttttttttttttttgagatagggtttttttgttgtttaggttggagtgtattttttaggtttaagtgatttttttattttagttttgtaagtagttgggattatagatgtgtgttattatgtttagttaatttttgtattttagtagagatagttttattgtgttgtttaggttggttttgtttgaattattaggtttaagttatttgtttattttggttttggaaaatgttgggatgataggattttattttttgtttttttttttttggagatggagttttattttgttgttaggttagagtgtaatggtatgattttagtttattgtaatttttgttttttgggtttaagtgattttttttgatttagtttttgagttgttgggattataggtgtttgtaattatgtttagttaatttttgtatttttagtagagatggggttttattatgttggttaggatggtttggattttttgtttttgtgagttattgtgtttggttgataggattttatttttatgtaatatttaggataagttaatttagagttaggaagtggatttagagtggttaggagttggtggaggggatggagagtgatataatgggaatggggtttgtttttggggtgattgaatgttttggaattagaagtagtggttgtatagttgtgtgaatgtatttaatgttattgaattgtatattgtgaatgaatgagttgtatagtatgtaaattttatttttatagtttttttttttttttttaatttttaataggaagtttaagtatggagtataaaaaatagttggggggttaggtgtggtgatttatgtttgtaattttgatattatgggaggttgaggtggattatttgaggttaggagtttgaaattagtttggttaatatggtgaaattttgtttttattaaaaatataaaaattagttgggtgtggtgatgggtgtttgtaattttagttatttaggaggttgaggtaggagaattgtttgaatttgggaggtggaggttgtagagagttgagattttattattgtattttagtttgggtgatagagtaagattttattttaaaaaaaaaatttggggtgttaggggtattttatgatttagttttttttatttttagtttagggttgttttttgtaggaagttttggtttattttttttttttagtgtattagttttagggtttattgtttattgtttttagggtaattttagaaggttaaggtttgagttttgttagggttgtaggttgtgttggggttgggtttggataaggggttgttagtttggggaggggttaggagagtaggatgaagggaaagtaaggtgtgatggggatggggtatagagggatatagttttttagaagtggagttagtgagtaattggttttggtttttggttgtgtttggtgttttgttgggttgtttagttttgaaagtgttttttatttttattggttattgtaggtttggtttgtttgttgagaagttttgtgtttttgttttttttgggttatgtggtggtggtattaatttttagtagggtttggtaaggttatttatagaattggttagggtttgtgtttatagtttggtaggtatttagggtattgagggggatgttgagggtgaggttgggtttggtaaaggttttggggtttagtgtttttttgtttgttaggttgtttaggagagtttggggtgggtttgagaggtttggtttagttttagatttttttgttttttagggttttgtgtgtttttaattttttttgttgatgaaggttataggttatttttgggaggtaagatttgttttttatttagaggagatgtggtggttggggggtggggaaggtgttgtttttagatagtagaggttagatgtttggatgtataggttttaagagtttgatgttttattaggaggtgaaagtatttttttttttagtaggagttggttattggtagggaaggtggtttaggatattattttagtttttttagtggagttgagggagttatgggtttttaggtttagtattgttttggtttattttttgttgtttgtgtagggattattttatatttatttaggttttagtatagttttaattttgaggaggggtagtgaggttaggagtttaatttgtatgtagttttagagttttgtgggggttgtttgggaggttgtatggttttaaaagtaaatgagggtggaggatttttttttggaaatttttttgtgttggttattatttgttgatattatgttttttttatgagttattattttatagatggggaaatgggtataggaggatttgtttttattgaaggtgttttgttttgtttttattttaatggggatattttatagtagtaggatatatagtagttgaaatgtggaagagtttaggtatttttgagtaggttagtatagattaagggatattgggttgtttgtttaattaaaagggattaaggtattttgtgtaggtatgtgtgttttttgatttatgttaggggaggagtgggggtggagttatttttgtttggtggtagttatttttgggatgatgggtgtatattagtttttttagattgttaggttttttttgatgtttttagttagaaaaagagtagaagaggaggtttagtgaaatttaagagtttggtgaggaataggaagagtttttaggagggggaagtttggtttttggggtattgttagttgttttgaggtgttatgttaggggtttattgggtttgtttaggtagtatggattgtttagttgatttgttgattagtaggataggaaataggaaggagagttataaatgttatttaagtttatagagaggtggggttaggagtttttgtttgtttagaaatagattatatagggaagagatgggtttggtttttgttttggttttttatggtttagagtaggattgggaggtatatggagatttaggaatatttagttttagatttgtgtgttttggtttttgaattttttttgatgtggttgaaataaggtttttaaggattttagagggatgttggttgagtatatgtgtattaaagtagttataatttataggtagaggtgggagtagtttaagtgtttagttatagatgagtagttaaatgtagtgtggttttttatatattggaaagtgatgtagttgtgaatagtagagaggtttggatttaggttatggtgtggatgttttttgaggatagtatattttgtgagataagttggatgtaaaaggttatgtggtgtgtgatattatttgtgtgaaatgtttaggataggttaatttagaggtaggaagggaatgtgtgggtgttgggattggggagggaatggggagtgatggttgatagagatggggtttttttttggggtaataagaatgttttggaagttgatagaggtgatagttgtgtaattttgttaatgtattatatgttattgaattatatattttaaaaaggtgaattttgttgggtgtggtggtttatatttgtaattttagtattttgggaggttgaggtaggtagattatgaggttaggagattgagattattttggttaatatagtgaaattttatttttattaaaaatataaaaaaattagttgggtatggtggtaggtgtttgtagttttagttatttgggaggttgaggtaggagaatggtgtgaatttgggaggtagagtttgtagtgagttaagattatgttattgtattttagtttgggtgatagagtgagattttattttaaaaaaaaaaaaaaaaaaaaaaaaggtgaattttaggtttagtattatggtttatatttgtaattttagtattttgggaggttagagaggattatttaaggttaggggtttaagattagtttgggtaatatagtaagtttttgtttttataaaataaaaaataaaaaggtgggttgggtatagtgatttaagtttgtaattttaggattttgggaggttgaggtgggtggattataaggttaggagattgagattatattggttaatatggtgaaattttgtttttattaaaaatataaaaataaaattagttaggtttggtggtaggtatttgtagttttagtttatttgggaggttgaagtggagtttgtagtgagttaagattgtgttatagtattttagtttgggggatagagtgagattttgttttaaaaataaataaataagtaaataaaggtgaatgtggtgaagtagtggtttatatttgtaattttagtattttgggaggtttaggtaggtggatagtttgagtttaggagtttgagattagtttggataatatggtgaaattttatttttataaaaaattagttgggtgtggtggtgtatatttgtagttttagttattttgggggtaggagggttatttgagtttagagttatgattgtgttattgtattttagttttggtgatatagtgagattttgtttttaaaaaaaaaaaaaaaaaaaaaaaaaaaggtgttaagaaaattgagtttagtttgagtaatatggtggtgtttgtgggatatatgggttgtttagttgttttattgattttttgatagttatagtagtgttttagattttgagagaggaattaatattttaggtttgttttagttggttgggtattggaagtttattgtgtgtatagtttagaatttttagtggatttattatttttgttgttttgtggttgtttagtttttgagttttttttgggttttagagtttttttttttgttgtttagagaggggtataaatagaggttttgaggatatttaggttttatatggttggtgtaggggttttagtagatgttggaattttataaaggttgtttgggatgtaaagatttataaagtttaggattgatttttagtttgtgaaaattttttttattataggtttaagtatttgttaattattgttgtaattaggtatattgagtgttgtttattttttattttttggttggatattgtgggggtggtgtggatgggagagttatagtttggatttgggtttgttttttatggtagtagtgatttttatatttttaaataggtagaaagaaaagatatgaaagtatagtgttttgtaataggtggaagtgataggaaagggtagggttgtgggatattgttaggttgtgtgtttatggtagttttgggtgtttttgtggaggttttataaggtgggtagattttttgtttttgagtttatttttattggggtggaaagggggagggaggtatggtggttttttgtttgtatttttttttttagaattttattgtgggttttgtagtagtagttagttgtgttgttttttgagaagtatggggagttgggttgggtataggtgattttttttagtttttttttgttttattttaggaatttattgtttattagaaatagtttatggtattgattttattttaattaattgtttttttgagatataattttgttttttttttttaggtttgtttagtttggaatgtaatgatgtgattttggtttattgtaatttttgttttttaggtttaagtgattttttttgttttagtttttttagtagttggattataggtgtgtgttattatgtttggttaatttttgtatttgtagtagagatggagttttgttatattggttaggttggttttgaatttttgattttagatgaagtagttgggattattggtatgtgttattatatttggttagtttttttatttttagtagagagagggttttattatgttggttatgttggttttaaatttttgattttgtgattaaattgttttggttttttaaagtgttgggattataggtgtgagttattatgtttggttttagttttttttttttttgagatggagttttatttttgttatttaggttggagtgtaatggtatggttttggtttattgtaatttttgttttttgggtttaagtgatttttttgttttagtttttagagtagttgggattataggtgtgtgttattatatttagttaattttgtatttttagtagagatagggttttattatgttggttaggttaatttttaattttgggtgatttatttgttttggttttttaaagtgttgggattataggtatgattgaatatgtttagttttttttttaatttattgatgttttttggaatttttttatttttaataagattatattttttgttggtgagagtgggataaggtatggattttagggttgtttttttgggaaggaagggaagagatgggatttatgttggttttatttgttttaatttattttttttggtgattgtttatgttttttatattaattggaggattggatgtttgaggtttgtttggaaggttttagatatttgttgtgagatataatttgagtggagtttattaaattttttatatataaaggaggttttttttttgtagtgttggtagtaaggttggttaaggttttgggttttagggttgggtagtggatattttttttttttgatagtattttgtatatggtagtttttagttagaatatattagtttttagaataggaggattttttggtagtatttagggggttggaggaaatgtagtggtttttgaattatagttgtaagtggggtagtttttgatggtagatagtgattaggaagggatagggtttattttttattttagggggttttgtaagggtaaagttgttatatatttagggttaggatgaaattggatgttgaatattagtgagggtgtattatttattttaaggtagtggggttaagttgtgggtagttgtgatgtatagtttagtttaggttttgttaatttttttgtttttttgtttttgtgtttttttttgtttttttaggtattgggttagattaggtttttgtaatttttttgtttgtttttattaagatttttaggttttgttttattgtttaggtgtttatttgagtttttaggattttttttattgattgtttaggaaagtagggggtttatttttatagttaggtttttattttttagtgtttgtttttttattgattttgtatatatatttgttaaaatttaagttagatttatttatttatttatttatttatttatttatttatttatttttgagatagagttttgttgtgttgtttaggttggagtgtaatggtgtgattttgggttattgtaagttttgttttttaggttttagtaatgttttgttttagttttttgagtagttgggattataggtatatgttattatatttggttaatttttgtatttttagtagagatggggttttattatgttggttaggttggttttgaatttttgattttaggtgatttatttattttagttttttaaagtgttgggattataggtgtgagttattgtgtttggtttttaagtgtgggttttttattgttgggagagagattgttattggtttttttagagggtatttgttatttttagtataggttttgtttagtttttgattaatttattttatagagattaggtataggttttgtttagtttttgattaatttattttatagagattaggtataggtaattgttttattgatttaaggtattggttatattttttatttgggtttagattgggtattgagatattagaaaggttttgtggaaatatattttttttagttgtttttatttaattttgattgttttagttttagagtataaattttagagtttgtgtttttggtttttgtatgttatagtttgtatgttgattaagaagtgtgttggttgggtgtggtggtttatgtttttaattttagtattttgggaggttgaggtaggtggattatgaggttagaagtttaagattaatttggttaagatggtgaaattttgtttttattaaaaaaaaaaaaaaaaaattagttgggtattgtggtaggtatttgtaattttagttatttgggaggttgaggtatgagaattatttgaatttagggggtggagattgtagtgagttaagattattttattgtattttagtttgagtaataagagtgaaattttgttttaaaaaaaaaaaaaaaaaaaaaaaaaaaggttgtatgtgttgatttatgtttgtagtattagtattttgggaggttgaggtgggtggattatgaggttaggagattgagattattttggttaatatggtgaaattttgtttttattgaaaaatataaaaaattggttgggtgtggtggtgggtgtttgtagttttagttatttgggaggttgaggtaggagaatggtatgaatttgggaggtggagtttgtagtgagtttagtttgtgttattgtattttagtttggggaatagagtgagattttgttttaaaaaaaaaaaaaaaaaaatgtatgtgagttttagggtttttgagtaggagagaggtgagagtagatatggtaggagttttagggtttttgagtaggaggaaggtgagagtagatattgtagtagtttttttttggatttttttttaaggttatggtgttttgtgtagggtgtttttgttagttttttgaggtttagtttagtagataaggtttttttttggaaataggaggtaaagttttgaaagttaagaaggttgggaaaggagtagggtttgggtagggtttgttaggtggtggtaggtgtagtgtgtttggttgtgataaggtagggatatttttggttatttttattagttgggagaggtttaggttggttagtgttgttttaggtaggagtttttttgtgtatagatgtagaggtgtttgggatgtttagtggtagttttgtgtttgaagaagttagttggaaaagtaaggttttttggatgtaatttgggagggaggtatagttttttttgggtagggtttttagttttgggggttagggatgtttttagtgttatatttttggtaaatgaggaaaggttatgttttttttttgttgattgataagttggtgtaaatagttatttttggtagtttagggtttttttttgataggataaataaattatattttgtttggttttggtaatggttatatattgtgtagaaaatgtgttggtggttgtatataaatttttggggtttaaataaatataggttgattttattgggtgtttttgttttttggatagttgggggagttaaggggttagttttaggggattgggggttgttttttttttaggagggttttgttattagggtattttaattggagtttaagagtttatgtaaatgtatgttttgttgtgataattggttttgtttgagtgaaagtttgtaatgtaggtttttaattatgttttttttggtatggaggatataggtgttagatgggtttagtttagggtgttaagaggaagtaagggagggagggaggagagaaggaaggaagatagaattattagtattgtgattggtttggtttggttttgattttagtaagttatatttatttttttatgttggtttttttgttggggattttttgtaattttttttttttgaggattttgatggtttttttgtatagtgtttttgagtttagtattttttttattttgttgtaagagtttttttttagtaggttttttattaggtatttgttgatgagtttggtttgtttgtggtgtggttggtagatgattttggtggagttgatgtggtggatgaatgtgtttatatttattgatattagtttgttttttgtgaatatgtttagttgttgtgggtttattatttttatgttggatttagggttttggagttttgttgttagttttgagtttgtgggtgagtggtttttttttgtgttttgattttttttttttaaaattttataaagaaaaaagaaaaaaaaaaggtaataaaaattttaaaaggaagggaaaaattttttttttaatagaaatgattgttttatatgttagttttggttgtgagtttaagtttggtgtagggtttgtggattggtgggtattgggggtttgggatggtggtttagatgtgagttttagtgggatttgggttttagaattgggagatggtttggttagggttaattttgtttttggggattttggggaggttggttggggttttttagtgttaggttattttttggggattttaggtttatggataagtatgaatatggttgagtgtagttttttttgggttgtttattttataggttgggtttgtgatgttgttattttttgggatttttatatttggagagtttaattttgttgggggtgtttttggtgatgttttggttttattgtttgttttaggagtaaatgttttgttgtggatgattgagtggattttttggggggtgttgatttttgttggtttgggtgagtgtttggggggttgggggtgtttgggaggttttttgttgtggttaatagttttgtttagggttggttgttgtttggtgtttgtgagggtttgtattgggtgttttttgagttggtttgtgatttttaaggtggttgttggggtttggtaggtgtttttttttttgtaaatgtttgtttgagtgtgtgttttgttttgagtgtttttagtgtttggtttgtggggtggtgtggtggtgggggttttatggggtttttggtggttgaggtggtgtaggttgtaggttttgggttggggggtttttgaaggtgttgggttttgggtggtgtgttttttttgttgtggttgttgtgtgtgtggaggaggtggagtggtgaggggggtttagtttatttaaggttgtggtagtaagtgttgttatttgtgttttttttgttgttttgtgttttatttgtgggtgttttgggttgttttttttttttgtgtttgatatgttgttgttattttgtttatttttttttttttttttgtgttgttgtggatattgtatgtttggttgtagggtatgtttttttgtgaggatgatgtgtttatttgttggttgaatttgttatttttggttttttgtttgttttgttgttgttgatgattggagtgtttggatttggttgggtgtttgagtggtgattggttggtgtttggttttgtttgaggggtggatatagtgtgtttattggtttttggagatgtttgttatgggtagggggtgggaagtaggtatggggagatgaggttatggttgtgattttggtggggtttgggaagggggttgtaggttatgggtgttaatggtttttttgaatggttgtagggtgggttgagtttggtgggtgggaatttgggtttgtggatttggaaggagtggggttatttttattagagttttttttttgtatttttttttggggtgaggttaagggttaaaaagtaatataaagtggttaattttagttaaaaattttttttttgagttatttttggattaggggaaagagaaatgtttagggtggtttttgttttattggaatttatgggggaagttttaggatagtgttgggataagtttagtgggggttttttgtgaaaaataagagttgttaaaatatggtttgataaggttgaaaatattgaatttttttgtgttagttttgtgttttttatttttttttgtattagtgttaggttgtttagttggaataaattattttggtataatttttgttttttggttttaagtgatttttttgttttagtttttttagtagttgagattataggtgtgtgttattatgtttggttaatttttgtatttttagtagaaattataggtgtatgtttgtaattttagttatttagaaggttgagggaggagaattgtttgaatttgggaggaggaggttgtggtgagttgagattgtgttattgtattttagtttgggtaataagagtgaaattttgttttaaaaaaaaaaaaaagattttttttagaaaattgaagttgaaggaatattttttaatttaaatttattttggtattttttttttgtattgattgttggtttatattttaattttttggaatttggagataatgttggataattggtattggtaggttttatgtttttttagagaattgtaggatatatggaagtgatttaggaaatatttggtgattattatagatagaatttttgaagatggattttttgtttaaagattattttttttaagaattttttttagttatttttttaagtgtttggatggagatgtgttgtgagtgtgaattatatatggaatttttttgtttttttgatatgtataattttattataaaatgttaaaaaatgtagtattttaaaaaatgtaagatgtattgttgatattaatttttataagtgtgttgtgttgttatatataataaattttttaaaaattattaaatatttagggatattaggtagggtgtggtggtttatatttgtaattttagtattttgggaggttgaagtaggtggattatgaggttaggagtttgaaagtagtttggttaatatggtgaaattttatttttattaaaaatataaaaattagttgagtgtggtggtatgtgtttgtaattttagttatttaggaggttgaggtaggagaattgtttgaattaggatttgggaggtggaggttgtggtgagttgagattatgttattgtattttagtttaggtaataagagtgaaattttgttttaaaaaaaagaaaagaaaagaaaagtattttttgtatagagaattttatgagttatatgaaaatttgtatagttttatattgaagttaatattgagttgtattagaatttatatttttagtaaaataagtttattgtataggtattattaaaggatagttatttattttttatttttattttttttttttttatttttattttttttttttttttttttttttttattttttggtttgtttttttttgagttttttttttttgttttatttttgtttttagtatgatatgtagtaatattttttttatattttttttgtagtttaattgttttttgtttatatggttgtttatttttggttgattgtttagattatattttatttagtttttttgtagtttttatgataaataggtttgggtgtttatttttgatttttgggtgatgtttagagtaaaataggaagaaggtagatggtggttttttaggagtattgtgattttttttttttttttttttatttttttttatattttggaggaatgtaatttttaatttttttgttatagtgagttttgttattttttgttttttttttaaattttattttttttttgtagatgtggttttttatttttttaaatattttttggagaattttatgaaattgatagaagagtttgggtgtttttttttgtgttttttttggtaggtttgtgtgaagagggtatatgaggatattttgttttttggtttgttggggtgttttttatttatggggatagaatagtatttatttggtgtgagtttttttttagagttttatagagtatttggatttaatagagatatttttttttatattgattttttttttttttttttgagatggagttttgttttgttgtttgggttggagtgtaatggtatgattttggtttattgtaatttttgttttttagatttaagtaatttttttgttttagtttttggagtagttgggattataggtatatattattatggttggataatttttggatttttaatagagatagggttttattatattgtttaggttggttttgaatttttaattttaggtgatttatttgttttggttttttaaagttttgggattataggtatgaggtattatgtttgttttatatattgaatttttaaagttagaaaaattaaaaatgggtttgttaggtatggtagtttatatttgtaattttagtattttgggaggttgaggtggatggattatttgaggttaggagtttgagattagtttggttaatgtggtaaaattttgtttttattaaaaatataaaaattagttaggtgtggtggtgggtgtttgtaattttagttatttgggaggttgaggtaggaggattgtttgaatttaggaggtagaggttgtagggagttgagattttgttattgtattttattttgggtaataatgagattttgttttgaaagaaaaaaaaatgggtttggtatggtggtttttgtttgtaattttagtattttggggggttaaggtaggtgattatttgaggttaagagtttaagattagtttgggtaatatggtaaaatttttgtttttattaaaaatataaaaattagttaggtgttgtggtgtttgtttgtaattttagttatttaggaggttgaggtaagagaattgtttgaatttgggaggtagaggttgtagtgagttaagattgtgttattgtattgtagtttgggtaatatagtgagatttggttttaaaaaaaaaaaaaaagggtataaataaaatattttattggttagatatagtggtttatgtttgtaattttagtattttaggaggttaaggtgggttgattatgaggttaggagtttgagattattttggttaatgtggtgaaatttggtttttattaaaaatataaaaattagttgggtgtggtggtgggtatttgtaattttagttatttgggaggttgagataggagaaaggtgtgaatttaggaggtggagtttgtagtgaattaagattgtgttattgtattttagtttgggagatagagtgagattttgttttaaaaaaataaataaataaaaataaaataaaatattttattaataattttaataatgattgtatgttgaaatgatgtaattttggatatgttaggttaaagtaaatgtattattaaaattaattattttagggttatgtatagtggtttatatttgtaattttagaattttgggaggattttttgagtttaggagtttgaggttagtttgggtaatatagtaagaatttgttttaaaaaaaaataaatatataaataataggttaggtgtagtggtttatgtttgtaattttagtattttgggagg

SEQ ID NO: 321 - DNA, 1157 bp, Artificial Sequence
  chemically treated genomic DNA (Homo sapiens)
ggattttgttttttttgaaggttttagggaagagtgttttttgttttttttgaaggttttagggaagggtttgtttttttaggtttttggtggtttgtaggtgtagttttttaatttttttttttaagtggtttgttgtttataaggatatgagttatattggatgaggggtttattaattgatggtttttgtaaagtttttatttttaaataaggttatattgtgaggtattgggagttaggattttaatatagtttttttggtggatataatttaatttttaataatgtttatataattttaagtagggtttggtattttgtgtgttttttggagagtggttgagttaggttttggtagtgtttaggttattggtgattgtagtttttggatggtattgtttattataggttttggaggttgtttttatggttttttgatagggtttttgttggtttgggggtttttgattaggggagtggttttaggaggggagagatttgtgttttgggtttagtgtagttgttttgagtaggattgggatttttattaagtgggtgttgttttatgatttttgtgtgtttttaggattatttgggtatgtggtaggttgtttgtatgtttgtggattatttttgtgataggaaaaggtatgggttatttggtaaattaaggtatagagttttaggtggaagttgggaaggtgttgtttggtttgtattggttgaagggttatttgggttaggtgtatagggtagtggtgttgttggaggattagggttggtgtgttggtgtttagtgaggatgtgtagattgttttaggtttggtgttgttgtattgggtatgtgttgatttggttgggtgggaatattttgttttgtttgggttttgttttagttttgtttttgtgtgttttggttttgtttttgtgtgtttttttgttttttttaggtttttggttttgttttgttttagattttgttttatgttgttatttttgtgttttttggttttgtttttgtgttttggatatgttgggatagtttgtgtttttagaatgttttgtgttttgatgtttgtaggtttttgtggtgtgtattgtttgtgatttggtgagtgtttgggttgttttgtttttggaagagtgtggagttt

SEQ ID NO: 322 - DNA, 1157 bp, Artificial Sequence
  chemically treated genomic DNA (Homo sapiens)
gagttttgtatttttttgggagtgaggtgatttagatatttattaagttgtaaatggtgtgtattgtgaggatttgtgggtgttgggatgtaaagtgttttaggggtgtgggttgttttagtatatttggggtgtgggggtggggttgaggggtatggggatggtggtgtggggtggggtttagagtggggtggagttgaggatttgagaaaagtaagagagtgtgtgggggtggggttggggtgtgtgggggtggagttggggtggagtttgggtggggtggggtgtttttgtttgattgggttggtgtatgtttagtgtggtggtgttgggtttgaggtagtttgtgtatttttgttggatgttggtatgttggttttggttttttggtagtgttgttgttttgtgtgtttgatttggatggttttttggttggtataagttgggtggtgtttttttagtttttgtttgaggttttgtgttttagtttgttaaatggtttgtatttttttttgttatagggatagtttgtgggtgtgtaagtgatttgttatgtgtttgagtggttttgaaagtgtgtgggggttgtaggatggtgtttgtttagtgagaattttggttttgtttggggtggttatgttgagtttggagtgtgagtttttttttttttggggttgtttttttagttagggatttttagattagtagagattttgttagggggttgtgggggtagtttttagggtttgtggtgggtgatgttgtttaggggttgtagttattgatggtttagatattgttagagtttgatttagttgttttttagagagtatatagggtgttaggttttgtttggggttgtgtggatgttattaggagttgaattgtgtttattagagaagttatgttggagttttaatttttagtattttataatgtgattttatttggagatggggattttatagaagttattaattagtgggttttttatttagtatgatttgtgtttttataggtagtaggttgtttggggaggaggattggagggttgtatttgtaagttattagaagtttaagaggatagatttttttttggagtttttggagggagtagaggatatttttttttggagtttttagagggagtaggattt

SEQ ID NO: 323 - DNA, 8093 bp, Artificial Sequence
  chemically treated genomic DNA (Homo sapiens)
ttatggaaggaaatgagattagttagtgagttgatatagaataaggtagtttaaaataaatttttttaaaaatatgaagaatagatattgaagggaagaggtgtttgtaaagattaagaaagtatatttggagatggtatttttttaaagttaaagttattaagtgtttaagtgttttaaggagggtaagattattaataaggatttagtatagtagagtaatttgagtggtaatatgggatattgggaatataaatttgttaagaaaattagtaggaatgagttataggatagtaattggtaaggatttaataattttttttttaatgtatgtattttaattatatttattgttataataggattagtaataattatatttatttaaaaaaaaaaagattgttatgtagttatagaattatttaatatagaaaatagtaaaatatatttttttttttttttttttttttttttttttttataaataagattagtttatagtaaattttttatagttaagggttaatttaaaatttttggtttatattttttttttatttaatgattatatgatgtaaattaattttattaatattttaagtaaaatatattggaattttataaaatgtataagattttaatatttaaggaattggggttagaaagtagaagtggtttttaggttttttagttttttttttaagtaataaagttttgttgtgaatatttaaagttattgggaaattattggtagatttttttgttttttttttttggttttttattatgttgtttttttagatatgtaagtttattttattaattaaaattttagtttgattatttttgataagtatttaattgatatgtaattttttttttgttttaaatatgtataataggatagagtttttaaatttgatttaattattaatttttgatttataagtgttatggtgagttaatagaatttattaatgtttttattgtattttattagttaaatttagaaggttggaattagttttttttatttagtattttgttagtttgtttagtttgtatttttaattttgtttttaatggtaatttgttttattttttgaaataaaataatttatattttgggagggttaattttttattgtgttaggttgttttatgtattgtaggggtgagtgtttttaggtttaaatgttaatagaagtttttagtaaatatgataattaaaaaagtgtttttatatattttttagtattttttggaatgataggttattgtttttagttgaaagttattggtataattttggtttttaagtttttatgttatttattttaattgtttagatattaattttatttaaatttttagttatagtttggttttttgaatttgttggattagtaattatagattaaggtgttttaatagttaagataggattttggaataagagtttttaaattgtataatatttgagaggatttatgaatataaattgggttttgtttataattagttttatataatgaattttaagattgtttttttatggtgaatagaagtttggaaattattgttttggtataaagtagattattttagtagaaatatagaattattgtaatttgtgaataagattgtttttaaatatttttatttgtgtgttattttatatatagaatgtgtatgatagttttaaattttagaataaatttatttttagtatttaataaaatttgatattgtattattttaaaataaagtgtttattttaggtaggattttttaaaataaagtagtaatatttatgtagataagataaaaaagttaaaatattttatattttttaattttggagtgtaattttttttttttattgtttttgatagggttaaatttgtgtttatagtaaaaaaaaaaaaaaaaagaattattaattggtaattattaagattttatatttattatagttttttaataggtaagttgataaaatagtttttagttattaaaaaaaaaatttaaggaaaatttttaataattagttttatttttaaattgtatgaagttttttatatttgaaatttaaaaatgattttaatgattttttttattagtaatgtgttattattgaggtgggtgatggggagggaagagggaagaaatttgttagtattatttttgaatttagaaatgtttaaaaaaaagttttaaatattttgatggttagataaaatatttttattgttatgtatgggttttttttttggaaatttatgaatttgttatgtgagtttttgtaaattggtttaaaagtatatttaaggagttgataatttaagattatatgaattagaattttaatattttattaaaataagagttgaaatttttggtatttatttttagaatatttaaaaaatagattgtaaatttaatttatattaatattaaatttttttaaaattaattatattataaaagataatgattttgttattaaattaagttttaaaaaaggtggtatttttatgttttagttttatgttgttatttgagatgaaaaaaaaggtaattgttagaattttaattgtgattagtttggatggttggtatttggtatttttttataatttaaattagtaaatttgaaaatttaaattaatttttgtttttagaattaaatttttgttgagttttttaattttgtattataaagttttatggattagatttattttttttttttataaggttattttaattgggttttattttagttgtggtaatttgaaatagggtttggagatgtttatttgttaatggttgatttaaagtgtgttggttttgagttaaatatgaaaaagtttttttatagatttggttattattaaataaggatgttattttataggtaatttttttgataattgggtaggatttagtagataatttagtataaaattgttttaagtttttgattttgtatttattttaaagattagtgtttgtttgaagttttgttagttttatttttattgaaataggtgtatatttaggtttaaagttaaatggatttgaaaaaagttttaagttttttttaatgaatttgaggtttttaaaatgttttttaaattttttttggagatgatagattattatttgatatttattaggattaaatatttttttattttttttattttgttgttttagtttattaataatttttttgagggtaggaaagtttgttagatttttttttttaatatgtttttgaaataaatttagtttaattttgaaagtataaatatggttaaaggtagtagtagtaaagattttattaatttgtaattttttattgagtttttgaaggtgttttataatgtttattaagaagttaaagttataaagttattgtttgtttgagaagtggattgttgttgtttttattgaaattaagaatgtttttatttttttttttagagagaatattagttttaaagtttttttttttttaagttaattgtttagatattgtttattaatttttttattatgttttgatttagattttgttagtaaagtttgaaatttaggttgtttaatgtttttggttttaattaaaattatttatttggatatggtatttatgatttgattaatatttatattataggagtttaatagttttaagtgaagaaattttgaataatgaatgatattttaatagttggggtttatggtttttttttttatgtatgagatgagttttgagtttttattaattatttttaaagtatgggttgtggttagtttaattattttttgtaagttaagttttgttgtttgtagggattttaggattgttgatatgagtgtattaatattgaaatgatgagttaggttgattatggttagaagatttttttgtatttttaatttagggtttatattgtggataaagattaggaggtagtttttataggttataaaagtttggttgtttaaggtaagagaataggttttaaagtttttggtttggttaaaaagttggttgtgtagatttttgttaatgtttaggattttttgttttgtgatatttggagataagttaatgttttgtaggatgtttatatgtttgggtagtattttttttagtaatatttttatgtattggtatataaagttttttttattttagttgtgattttttaaggttaagaggtggtagagtttgaggtttgtatgagtagttttttttttaggagtgaaggaggttatgggtaagttgttttgatgtagatgttttattagggttgtgtgtttgttgtttgttatatattgtttgtagtatttgtgtttagttttgtagtggtgtttgatgttgtgtttgtgggtagttatgatgaggtggtgatagattaggtatagggttttattgttttttggaggttttattattaaataatgttgggtttatttgggttggaaaattagagttttgttgatttttattttgttttttttgggtgttatttatattttgtgggaggttataagagtagggttaatgttagaaaggttgtaaggggagaggaggagtttgagaagtgttaagtattttttttgttttgtgttagattattttagtagaggtatataagtttggttttggtatttttgtttttattggttggatattttgtattttttgagtttttaaaaatgaattaataggaagagtggatagtgatttttaatgtgtaagtgtatatttttttaggtagtgggtagtagttgttttagggagggatgaagagatttagtaatttatagagttgagaaatttgattggtatttaagttgtttaattaatagttgttgttgaagggtggggttggatggtgtaagttatagttgaaggaagaatgtgagtatgaggtattgaggtgattggttgaaggtatttttgttgagtatttagatgtttttttggtttttttggtgttaaaatgttgtttgtggtaggggttatttggtggttggatgagatagtggtgaattgtattgtggtgggggaagttatttagtggttagttaatgttattaaagagatgattgagaattggtatggagggagttgagttgggtttatttaagggttatgatttaatgggttgtgttatttaatggtgtggatatgtttttttgtttgggtagaggtatgtatagtgtatgtttataatggtggaggttgttgggttttttgatgtgttagttaggttttttttttttttgtagattgtgtgtttttttattgtttttttttgagattttttaagggttgtttggagtgtaagtggaggaatatatgtagtgttgttttaatggtattgttaattaagtaaggaagttatttaatttaaaattatgtatgtagaatatgtgaagttaaaagatgtataaaagtttaagatggggagaaaaatttttttttagagggtattgtgttattgtttttttgttttttatttattttagaaattatttgtttatatttaaaggtataatttattttgagttttttttaaaataaattgtttgtagttttaggataggttgatgtattttgggtttgatttttgattattttattgttaaattagtgattttttttagtgtttttttgttttttattttggaggatgtattttgaagatattagattttatgggttatttttggattttgaagtttataattgtgataaaaaatgtgaagggaagagatttgaaatatgtggaaggaaaagtgagtgtagattataaatttttaaaaagataagtttaaaatatatttaaatgttatgttagattattttgttaaaattagttgttagtgatgtttgtatgttaatagaaaaaagaatgttttagtttggagtggtaggtttttagagggatttattgtgaaagtataaattatttagggtaatgggattgagagaatagtgggtagaaaggattattgaaggaaaggaagagaattggaaggtagatgaaagaaggagtaagaatttggggatgtttttttttttttatttgtaatagtagtaatagaagtaatggtagattggtttttgtttttattgtgttagaatgaattgataggataattgggtttattattgtattgtgttagaatattgtaaaataaaattaaatatattagtttggtggtttgtaattaattatttaagtggagatttttattttttttttattttttttttagatggagttttattttgttatttaggttggagtgtagtggtgtgattttagttgattgtaattttttttttataggtttaagggagatttttttgttttagttttttgagtagttaggattataggtatgtgttattatatttggttaattttgtatttttagtagagatgggatttttttatgttggttaggttggtgttaaaatttttgattttaggtgaattgtttgttttagttttttaaagtgttgggattataggtgtgagttattgtgttttgtagttttttgtatttttaatagagatagggttttattatgttagttaggatggttttgattttttgattttaggtgatttgtttgttttggttttttaaagtgttgggattataagtatgagttattgtgtttggtttaagtggagatttttatatggagtttagttatattttttttaatatataagttgagatgattaatataattttaatataggggtttatgagaaatgtttgtaatatttaagtaatttattgtttttttttttttttttttaagatgaagttttattttgttgtttaggtggaagtgtagtggtgtgattttggtttagggtaatttttgttttttggttttaagtgatttttttgttttagttttttgagtagttgggagtataggtgtgtatgattatatttggttaatttttttatttttagtagagatggggtttttttatgttggttgggttggttttgaatttttgattttaggtgatttgtttattttagtttttttaagtgttgggattataggtgtgagtttttgtgtttagtttattattttatttttgaataaagaattgtttgtgtggggaatagataatttttttttatgtagtttttgttagaaaatttgttttttttagtagttggtttgtgtttataggttattttttgaaagtataaaaaatttattgattttttttttttgggtttttttttttttttgagatagagttttgtttttgttgtttaggttggagtgtaatggtgtgattttagtttattgtaatttttattttttgggtttaagtgatttttttgttttagttttttgagtagttgggattataggtatgtgttattatgtttggttaattttgtatttttagtataaatggggtttttttatgttggttaggttggttttaaatttttgattttaggtgatttatttgttttggttttttaaagtgttgggattatgggtgtgagttattgtgtttggttagaaaatttattgattttttaaagatttattaattttttgtattattttttttttttttttttattgtaaatataaaagggaatagtagagaaaattatttagaattttattttttagtgatattatttagtgatattttattagagttatttaggaatttgaggttgaataaagtttaggtaaaagtaaaattagttgagaagagatatttgttaaaagaaatttatttttaattttatttgttgttttttttagaggaatagaaatagtgttgaatgttttattagaaatgatggttgttttgtttgtttttttttttttttttatataatatgtaaatttatatagtgtatgagtttgtaagataaaggaaaaatatgttaatgaggtattattgtttgtatttggagtttgttattattgtttggtttatattaaaatatgtatattagagtagttgtagattgataaattattttttgtttgatttgttagt

SEQ ID NO: 324 - DNA, 8093 bp, Artificial Sequence
  chemically treated genomic DNA (Homo sapiens)
attggtaaattaaatagaaaataatttattagtttgtaattattttaatgtatatattttaatatgagttaagtaatgataataaattttaaatataaataatagtgttttattaatgtgttttttttttgttttataggtttatatattgtatgagtttatatattgtgtgagagagagggaagagatgggtagagtaattattatttttaataggatatttagtattatttttgtttttttaggaaagatagtaagtgaagttaaaaatagattttttttggtagatgtttttttttaattaattttatttttatttgaattttatttagttttaggtttttaagtgattttaataaaatgttattaaataatgttattaaaaaataaaattttgaatgattttttttattatttttttttatatttatgatggaggggaaaaaaaaaagtaatgtagaaagttaataaatttttaggaagttaatgaattttttggttaggtgtaatggtttatatttataattttagtattttgggaggttaaggtgggtggattatttgaggttaggagtttgagattagtttgattaatatggagaaattttatttgtattaaaaatataaaattagttaggtatggtgatgtatgtttgtaattttagttatttaggaggttaaggtaggagaattatttgaatttaggaggtggaggttgtggtgagttgagattgtgttattgtattttaatttgggtaataagggtaaaattttgttttaaaaaaaaaaaaaaatttaaaaaaaagaagttaataaattttttgtgtttttaaagagtagtttataagtatagattaattgttagagaaaataaattttttagtaggggttgtatgagaaagagttatttattttttatatagataattttttatttagaaataagataataggttgggtatgggggtttatatttgtaattttaatatttggggaggttgaggtgggtggattatttgaggttaggagtttaagattagtttggttaatatggagaaattttgtttttattaaaaataaaaaaattagttgggtgtggttatgtatgtttgtatttttagttatttgggaggttgaggtaggaagattgtttgaaattaggaggtagaggttgttttgagttaagattatgttattgtatttttgtttgggtaatagagtaagattttattttaaaaaaaaaagaaagaagataataagttatttaaatattatagatattttttatgagtttttgtattgaagttgtattagttattttaatttatatattaaaaagagtataattggattttatataaaaatttttatttgagttgggtgtggtggtttatgtttgtaattttagtattttgggaggttaaagtgggtagattatttgaggttaggaaattgagattattttggttaatatggtgaaattttgtttttattaaaaatataaaaaattgtagggtgtggtggtttatgtttgtaattttagtattttggaaggttgaggtaggtggtttatttgagattgagagttttgatattagtttgattaatatggagaaattttatttttattaaaaatataaaattagttaggtgtggtggtatatgtttatagttttagttatttgggaggttgaggtaggagaattttttttgaatttgtgaggaggaggttgtagttagttgagattgtgttattgtattttagtttgggtgataaagtgagattttgtttaaaaaaaaaataaaaaaaaaataaaaatttttatttaagtaattaattataagttattaagttagtatgtttagttttgttttatagtattttggtatagtataataataggtttagttgttttgttaatttattttaatatagtagaaataaaagttagtttgttattgtttttgttattattattataagtgaaaaggaaaaaatatttttaggtttttgtttttttttttatttattttttaatttttttttttttttttagtggttttttttatttattgtttttttagttttattgttttgaatagtttatatttttataataaatttttttagaaatttattattttaaattgaagtatttttttttttattaatgtatggatgttattaataattgattttaataaaataatttgatataatgtttaggtgtattttgggtttgtttttttggaagtttatagtttgtatttatttttttttttatatgttttaaattttttttttttatattttttgttatagttataagttttaaaatttaaggatgatttataaaatttggtatttttgaagtgtgttttttgaaataaaggataggaaaatattaagaggggttattaatttaataatagggtaattagaagttaagtttaaagtgtattagtttgttttaaaattataaatgatttgttttgaaagaaatttaaaatgaattgtgtttttggatgtgaatagatgatttttggaatgaatgaaaagtaagaaaatagtaatatagtattttttgaaaaaaggtttttttttttattttaagtttttatatattttttaattttgtatgttttgtatatataattttaaattaagtggtttttttatttagttaatggtattattaagataatattatgtatatttttttatttatattttaaataatttttaaaaggttttgggggagagtggtaaagaaatatatggtttgtggaaaaggagaaggtttgattggtatgttagggaatttggtggtttttgttgttgtgggtatgtgttgtatatgtttttgtttgggtaaagaggtgtgtttgtgttattgagtgatgtggtttgttaagttgtagtttttaagtgagtttggtttgattttttttgtattagtttttaattatttttttgatagtattagttggttgttggataattttttttgttgtgatgtggtttattattgttttgtttagttgttgaataatttttgttatgaatgatattttggtgttagaagagttaaggaaatgtttagatgtttaatggaagtgtttttagttaattattttagtgttttgtgtttatgttttttttttagttgtagtttatgttatttagttttattttttagtggtagttattgattggatagtttgaatgttagttaaattttttaattttgtgggttgttgggtttttttgtttttttttgaagtggttattgtttgttatttagaaggatatgtgtttgtgtgttagagattgttgtttgttttttttattggtttgtttttaggagtttggggaatatgaaatatttagttaataggagtagagatgttggaattgggtttgtgtgtttttgttgaggtgatttggtgtagagtggaggaggtgtttggtgttttttaggttttttttttttttttgtggtttttttaatgttggttttgtttttgtggttttttgtagaatgtggatgatgtttaaaagaagtaagatggaagttgatgaggttttagttttttggtttgagtggatttagtgttatttggtggtggagtttttggagggtgatggggttttgtgtttggtttgttgttgttttattgtagttatttgtgaatgtgatgttaggtgttattatgaggttgagtatgaatattatgagtggtatgtggtggatggtgagtgtgtggttttggtggagtgtttgtgttagggtgatttgtttgtggttttttttatttttgaagagagagttgtttgtgtaggttttgggttttgttgttttttggttttgaagggttgtggttggggtgagggggattttgtatattagtgtatggaggtgttgttgagagaggtattgtttgagtatgtaagtgttttgtaaggtgttgatttatttttagatattataaggtagaggattttgagtattgataggaatttatgtaattagttttttaattgagttagggattttaaagtttatttttttgttttggatgattaggtttttgtggtttatgagaattattttttggtttttatttgtggtgtaggttttgagttggaggtgtaagaagattttttgattataattaatttgatttattattttagtgttggtgtgtttatgttggtaattttagagtttttgtagatagtagggtttagtttgtagagaatggttggattgattatgatttatattttgaggatgattggtgagaatttaggatttgttttatatatgagagaaaaggttgtaagttttaattgttggaatgttatttattatttaggatttttttatttggaattgttgagtttttatgatgtagatgttaattagattataaatattatatttgaatggatagttttgattaagattagaggtgttaggtgatttgaattttagattttattaatggaatttgaattagagtatggtgaaagggttaatggatgatgtttgaataattggtttaggagagggaaaattttaaaattaatattttttttaagaaaagaaatggaagtgtttttggttttagtaggggtaataatagtttattttttagataaataatggttttgtgattttggttttttggtggatattatggaatatttttgagaatttagtgaagaattatgagttagtaaagtttttgttgttgttgtttttgattatatttgtatttttgaagttaagttgaatttattttaaagatatattgaggaaaaaaatttaatagatttttttgtttttagagaagttgttgatgagttaaaatagtaaaataaggaagatgaaaaaatatttgattttgataggtattaaatggtgatttgttgtttttaaaaagaatttgagagatattttaaggattttaggtttattaaaaaggatttagaattttttttaaatttatttaattttaaatttgaatatgtatttattttagtgagggtggagttaataaaattttaggtaaatattaatttttggaatgaatatagaattaaagatttggggtagttttatgttggattgtttgttgaattttatttaattattaaaggggttgtttgtaaggtggtatttttgtttgatagtaattaaatttgtgaaaaggtttttttatatttgatttgaaattaatatattttgagttagttattaatagatgagtatttttaagttttgttttgggttgttataattgaaatggagtttggttgggatgattttgtgagagaaagaaatgaatttaatttataaggttttgtagtataagattgaaaaatttaataagaatttaattttaaaagtaaaaattggtttgagtttttaagtttattaatttggattgtgagaaagtattaagtattagttgtttaaattgattataattaaaattttgatagttgtttttttttttattttaaatggtagtatgggattgaaatatgagaatgttattttttttaaaatttagtttagtgataaagttattgttttttatgatatagttaattttaaagagatttagtattaatgtgagttgaatttgtagtttgttttttaggtgttttgaagataaatgttaaaaattttagtttttattttaatggagtgttaaaattttgatttatatagttttaaattattaattttttaaatgtgtttttgaattaatttgtagaagtttatatagtaagtttataagtttttaaaaaggaagtttatatataatagtggaggtgttttgtttaattattaaaatgtttgagatttttttttaaatatttttgagtttgaaggtaatattgatagatttttttttttttttttttttattatttattttagtgataatatattattgatagaggaagttattagaattatttttaagttttagatataggagattttatgtaatttggagataagattaattattgggggttttttttggattttttttttaataattgggggttattttattagtttgtttattaaaggattatggtaagtatagaattttaatggttgttagttagtaattttttttttttttttttttattgtagatataagtttggttttattaaaaatgatgaggaaaaaagattgtattttaggattaggaggtgtgagatattttagtttttttgttttatttgtgtgggtattgttgttttattttaaaaaattttgtttaaagtaaatattttgttttaaaatgatatagtattagattttgttagatgttagaaatggatttattttaaaatttggaattgttgtatatattttatatgtaagatagtatataagtagaaatatttaaaagtagttttatttatagattgtagtaattttgtatttttattaagataatttgttttgtgttaaaatagtaatttttaaatttttgtttattatgaaaaggtaattttaaagtttattatgtaaaattaattataaataggatttaatttatatttatagatttttttaagtattatataatttaaaaatttttgttttaaagttttgttttaattattgaaatattttaatttgtggttattaatttagtaaatttaaggaattaggttatgattaagaatttaggtggaattgatgtttgggtaattaaaataaatggtataagagtttaaaaattaaagttgtgttagtggtttttaattagaggtagtaatttgttattttagaggatgttgagaaatgtgtaggggtatttttttggttgttatatttattaggggtttttgttggtatttaagtttaaagatatttatttttgtagtgtatgggatagtttggtataatgaagaattagtttttttaaaatgtagattattttattttaagggatagggtagattattattagaagtaaaattaaaagtataagttgggtaaattgatagaatattagataggagagattaattttaattttttaaatttggttagtaaagtgtaataaaggtattgataagttttgttagtttattatagtatttgtaaattaggaattaataattgaattagatttaagggttttgttttgttatatatatttaaggtagaaaaaaagttatatgttgattaggtatttattaagaatggttaagttgagattttggttaatagagtaagtttatatatttagagaaataatatagtggaaaattgaaaaaaaaaaatagaaaaatttattggtaattttttaatagttttgaatatttatagtagagttttattatttgagagaaagattggaagatttgaaagttatttttgttttttaattttagttttttaaatattgaaattttgtatattttgtgaaattttagtatgttttgtttaaggtgttaataaaattagtttgtattatgtagttattgagtgagggggagatataagttaaggattttaaattgatttttagttatagagaatttgttataagttagttttgtttgtaaaaaaaaaaaaaaaaaaagaaaaagaaaaaagtgtattttattgttttttgtattaagtaattttgtaattgtatggtagtttttttttttttaaataaatatagttgttattggttttgttgtagtagtgaatatagttaaaatatgtatattaaaaaaaaaattattaggtttttattagttattgttttatagtttatttttattagtttttttgatagatttgtatttttagtgttttgtattgttatttaaattgttttattatgttaagtttttgttaatagttttattttttttgaaatatttgaatatttgatgattttagttttgaggagatattatttttaggtgtgtttttttagtttttgtaggtattttttttttttaatatttgttttttgtatttttaaaaaaatttgttttagattgttttgttttgtgttagtttgttagttgattttatttttttttatgg

SEQ ID NO: 325 - DNA, 6521 bp, Artificial Sequence
  chemically treated genomic DNA (Homo sapiens)
ataaaattatgtatgggtaaaagatttaattaggtgtagtttagaaaaatggattttttttttttttttgagatagagttttgttttgttatttaagttggagtgtagtggtgtaattttggttaattgtaatttttgttttgtaggtttaagtgatttttttgttttagttttttgagtggttgggattataggtgtgtgttattattatatttgattaatttttgtagttttagtagagatgggagggttttattatgttggttaggttgtttttaaatttttgattttaggtgatttatttattttagtattttaaagtgttgggattataggtgtgagttattatgtttagatttaaattttttttgttttttttttttttttgggggtggggggtagggttttattttgttgtttaggttggagtgtagaggtttgattttggtttattgaaatttttattttttaggtttaagtaatttttttattttagttttttgagtagttgggattataggtgtgtattattatatttggttaattttttgtatttttggtaaagatggggttttgttatgttgtttaagttgtttttgaatttttgggtttaagtgatttttttgttttatttttttaatgtgttggaattgtaggtatgagttattatgtttggaataaagttttattttttaagtggattatttaaaaaaatgttttatggttaggtatgttatttttttttagtttgggtaagtgagttgagattgtgttattgtggtttggtttgagtgatagagggagattttattttagataaataaataaataaaattaaaataaatttaaatattttttatatgataaaattatttttaatggtaattataaaatgaataataagggttaagaaataaatttagtgaatattttttttttttgaattttgtaaatataattatgttagtataaaaatagttatgtattgtttaataatagggatatgttttgagaaatgagttattaggtaattttgttattgtgtaaatattatagagtgtatttttataaatttagatggtgtagtttattatttatttaggttatatggtatagtttggtgtttttaggttttaatgtttatagtatgttattatattgaatattgtaggtagttgtaagataatggtatttgtgtatttattgtagagatagggtttttttgtttgttgtttaggttggagtgtagtggtataattatagttttttgtagtttttaatttttgggtttaagtgatttttttattttagttttttaagtagttaggattatatgtttgtgttattaggtttgtttattgtttttgtttgttttttggtagagatggagggttttattatattgtttagattggttttgaatttttggttttaagtaatttttttgttgttttggtttttaaagtgttggtattataggaatgagttaaaagtttaatatggttgttgaataaaagattgatttaattaagtatggattttgtttttatggagttgaaggttgttagagtagataaaatgagttattatttttatatgagttagatggtggataaagttattattgagggtaggtaaagaattgggttggtttaaagatgttagggattttttttagattagtggtagagggttggttaaggagttttttgaaggaggtggttttttatttgagttttaaagaatagaagagattagatagggaggatagtaaaatttttttttttttttgaaatagttttgttttgttgtttaggttggagtgtagtggtgtgattttggtttattataagttttgttttttgggtttatgttatttttttgttttagttttttgagtagttgggattataggtggttgttattatgtttggttaatttttttttttttttttttttagtagagatggggttttattatgttagtgatgatttttgtttgtttgtttgtttttgagatagagttttattttgttgattaggttggagtgtagtggtgtgattttggtttattgtaatttttgttttttaggtttaagtgatttttttgttttagttttttgagtagttgagattataggtgtttgttattatgtttagttaatttttgtatttttagtagagatggggttttattatgttggttaggttggttttgaatttttgattttaggtgatttgtatattttggttttttaaagtgttggtattagaggtatgagttattgtatttggttagtaaaattatttgtgatatagtagtaagtgtataagtattgatttattagagttgaaggtggttgaggtatttaagtgggtttttggggattttgttatgttagggaatatttttttagataagggattaggaggtttggagggtttttaaggaagagttagggtagtaggggtattttggagttaggggttatggttatatgttaataggattagaaatattttaatgtatttaattaatttatataattatattggtgggtgtttattgaatattagttttagatatggatttgaaatggttttatttttttttagtttgtttaagttaatggagttttattagaatgtgagttataaaatagtagagttattttttatttaatgttgtatttgtagggtttagaatagtatttgaaggattggtggaggtttaataaattgttaaaagggtagattagttaggtgtgatggtgtgtgtttgtagttttagttatttgggaggttgaggtaggaggattatttgattttaggatttttgggttgtagtgtagtatattagttaggtgtttgtattaagttttgtattaatttggttgtttaaggatggttgaattgatttaggtggaaattggagtaggttaaaatttaatgttgattagtaatagggttgtatttgtaaatagttattgttttttagtttgggtaatatagtgagattttatttttaaaataaattttaaaaataattaattagaaaaaaaaattagtttgtaattttagtattttgggaggttaaggtgggtagattatttgaggttaggagtttaagataagtttggttaatatggtaaaattttaatttttattaaaaatataaaaattagttgggtgtggtggtaggtgtttgtagttttagttatttaggaggttgaggtaagagaattgtttgaatttgggaggtggagattgtagtgggttgagattgtgttattttattttagtttgggtagtagagtgtgattttgttttaaaaaaaaaaaaaaagaaagaaaagaaaagaaaaagaaaagaaaagaaaaaaattgggaggtttaagtttatttttggtgtttttatatttttttgttttatttttttgtatttagtttttttttgtaatttgtgttttatattagtttttaagtttttaatgtgatttagtatgagaattggattttgttatttttttgtttataatattttatgttttttttttgtttagaatattattttttttattgtttttattaatggaattggtatttttttaaggatatgattaaatttgtttatttttatattattttttaaagtagaatttatttttttttttttaatatgatgatattgatagggtttgtttttatttattagattgtgagttgtttagggtaggtagtgttttttgtttttgtttttgttttttttttttgagatagggttttgttttgttatttaggttagagtgtaatggtatagttttagtttattgtagttttaattgttttggtttaaattattattttattttagttttttgagtagttgggattataggtatatgttattatatttggttaatttttttgtatttttagtagagatagggtttggttatgttgtttgggttggttttgaatttttggatttaagtaatttatttattttagttttttaaaatgagggattgtgttttatttatttttatgtttttagtttatagtttagtgttggatttatggtagtattaaataaatatttgttgaatgtaatagtaaatagtattttagggagtaagaattagattaataaaggtggtaaaaggtttggagaaaaaaataatagtttaatttggttagagtatgagggagagtagtaggagataagatggaaaggttttttgggtaaggttttgaaggaagttggaagttagaagtatataatgtgtatattgtggtaggtagtggggagttaatgaaggtttttgagtaggagagtaatgtgttgaaaaataaatataggttaaatttattagagtttttttgatatatatatttgttttttatttaagtttaagtttgttttttatatatttattatttaatttatttttgggtttttttagtagtttgttttatttttttatttgttttttggtggagttagggatgtatatatgagttgtttttttttttagttagaggatatgggggttttagtttttttgtttttttttttttgtgtttggagttgggaagtaggttagggttagttgaggttggttggtaagtagttgggtggtgttagggagagtttgtatagtgttaggtggtgttttgggttttaagttgagtttatggttttgataattttttgtttgtgtatatatttgttttttattttatttttattttagttttggtatgggggagagggtatagggttagataaatttgtgagattttggttttatttttgtaaaagggtgttttgtgagttagtttgtttttttttaggtttgttttttttttatttagtttttgtttttaatgtatgtatagtttgtatatattgtgtgttgggatattttatagttagttgtatggtttttttgtgttttagtttttggttttttttgttgattttggtttttgttttaggttttattgtgtaattgttgttgttattgttgtttttggtgtttgtttatttttagaggttgttttggatgtaggaggatttttttttgggaggaggtttttttggggaagatgatttattgggtgaggaggatttgtttagtgaagaggatttatttagagaggaggatttatttggagaggaggatttatttggagaggaggatttatttggagaggaggatttatttgaagttaagtttaaattagaagaagagggttttttgaagttagaggatttatttattgttgaggtttttggagatttttaagaattttagaataatgtttatagggataaagaaggtaagtggttattaatttttaaatttaggttttaggaggtttatgattttttttttatattttagtttaggttttgtttatttagggaaggaggggagattgtattttttatagaagtttttttagaggttttatattaatatttttatttttatttttggaggtagaaagggatagatgtggagagaaaataaaaagggtgtaaaaggagagaggtgagttggatgagatgggagagaagggggaggttggagaagagaaagggatgagaattgtagatgagagaaaaaatgtgtagatagaggaaaaaaataggtggagaaggagagttagagagtttgaggggaagagaaaaggaaagtttgggaggtgaagtgggtattagagataagtaagaagagttggtagaagttattttattttaggttataatgaggaaattgagatttaggaagaagggatatagtaggtagagaaatgtggttttttgatttttaagttaggaatttggggaaaggggttggagattatataaggtagagggatgagtggggagaagaaagaagggagaaaggaaagatggtgtatttatttatttgggatttaggattgaagtgtttatttattttttttttttttttttttgagataaatttttatttttgttgtttaggttggagtgtaatggtgtgattttggtttattgtaatttttattttttgggtttaagtgatttttttgttttagtttttagttaagtagttgtgattataggtatgtgttattatgtttggttaatttttgtatttttagtagagatggggttttgttatgttggttaggttggttttgaatttttgattttaggtgatttaattattttggttttttaaagtgttgggattataggtgtgagttatagtgtttggtttgaagtagttatttatttttatagattttaagataatgattgtaagttggtaggattgttgtttggtttatttagttgtggtgttgagtttgggtgtggttttttgtgttttgtatttggtttgtttaaggtatttgttatttgtaatgtttttgtaaggtatttgtgtttgtgatattgttttggttgttaggaagggattggggttttaagtttgagtggtttattttttttatttatatagg

SEQ ID NO: 326 - DNA, 6521 bp, Artificial Sequence
  chemically treated genomic DNA (Homo sapiens)
tttgtataaatgaaaaggatgaattgtttaagtttagagttttaatttttttttggtgattaaaatgatgttataaatgtagatgttttataggagtattatgggtaataaatgttttaagtgggttaggtgtaaagtataggagattgtatttaaatttaatattgtagttgggtgggttaaatagtaattttattagtttgtaattattgttttagggtttgtaaaagtgagtggttgttttaggttaggtgttgtggtttatgtttataattttagtattttgggaggttagggtggttggattatttgagattaggagtttgagattagtttgattaatatggtgaaattttgtttttattaaaaatataaaaattagttgggtgtggtggtgtatgtttgtaattgtagttatttggttagaggttgaggtaggagaattatttgaatttgggaggtggaggttgtagtgagttgagattgtgttattgtattttagtttgggtaataaaagtgaaagtttgttttaaaaaaaaaaaaaaaaaaagtgagtgggtattttagttttgagttttaaatgagtgagtatattattttttttttttttttttttttttttttttatttatttttttgttttgtatggtttttaatttttttttttaaatttttggtttgggagttaagaagttatgtttttttatttgttgtgttttttttttttaggttttaatttttttattgtagtttaagatgagatgatttttattagttttttttgtttgtttttggtatttattttattttttaagtttttttttttttttttttttaaattttttgattttttttttttatttattttttttttttgtttgtatatttttttttttatttgtagtttttattttttttttttttttagtttttttttttttttttattttatttagtttatttttttttttttgtattttttttattttttttttatatttgtttttttttatttttgagagtggggatggggatattggtatgggatttttggaagggtttttgtggggagtatagttttttttttttttttgagtgaatagagtttaggttggggtatgggaggggagttatgaattttttggaatttggatttggagattgatgattatttattttttttgtttttgtgggtattattttggggtttttgaggatttttaggagttttaatagtaggtagattttttaattttagggagttttttttttttgatttaggtttaattttaggtagatttttttttttaggtagatttttttttttaggtagatttttttttttgggtggatttttttttttgggtgaattttttttattgggtagattttttttgtttagtgggttattttttttagaagagtttttttttaagggggaatttttttgtatttggggtaatttttggggatggataggtattagaagtagtagtgatagtagtagttgtatagtgaggtttggagtaggggttgggattaatagagggagttaggggttggggtataggggagttatgtggttgattgtggggtgttttagtatatggtgtgtatgggttgtatgtgtattggaaatgagagttgggtgggggaggagtaagtttggaggggagtaggttgatttatagagtgtttttttgtagagatggagttaaagttttataggtttgtttggttttgtgtttttttttttatattaaagttaggatgggggtggagtgaggggtaggtgtgtgtataggtagaaggttattggggttatggatttagtttggaatttaaggtattatttggtattatgtaggttttttttggtattatttagttgtttgttagttagttttagttaattttggtttgttttttagttttaggtatagaaggggaaaggtaggggagttggggtttttatgttttttggttgagagggaaagtagtttatgtatatatttttgattttattaggaagtaggtaaagaggtagggtaggttgttaggggagtttgagggtgagttaagtaatgggtatgtgggagataaatttgagtttgaatgaaaagtaagtgtatgtgttagaggggttttgataggtttaatttatatttattttttaatatattatttttttgtttaaaagtttttattggttttttattgtttgttatgatatgtatattgtgtatttttgatttttaattttttttaaaattttgtttaagagatttttttattttgttttttattatttttttttatattttagttaaattaaattattatttttttttttaaattttttattatttttgttaatttagtttttgttttttgaaatgttatttattattgtatttaataaatatttatttagtattattataggtttagtattgggttatggattagggatatggaaatgaataagatatggttttttattttgggaggttgaggtgggtggattgtttgagtttaggagtttgagattagtttgggtaatatggttaaattttgtttttattagaaatataaaaaaattagttaggtgtaatggtatgtgtttgtagttttagttatttaggaggttgaaatgggatgatggtttgagttgaggtggttgaggttgtagtgagttgagattgtattattgtattttggtttgggtgatagagtaagattttgttttaaaaaagaaaaataaaaataaaaataaaaaatgttatttgttttgagtagtttataatttagtgagtgagggtaaattttgttaatattattatattgagggaagagagatgaattttgttttagaagataatatagaagtaggtaaatttgattatgtttttgaagaaatattagttttattggtaaaaataatagggagaatgatattttgggtaaagggaaggtataaaatattatgagtaggagagtgatagaatttagtttttatattaggttatgttgagggtttgagggttagtatggagtatagattgtaggggaagattgggtgtaaggagatggggtagaagagtgtgaggatattaagaatgggtttaggttttttagtttttttttttttttttttttttttttttttttttttttttttttttttttttgagatagagttgtattttgttatttaggttggagtgaagtggtgtgattttggtttattgtaatttttattttttaggtttaagtgatttttttgttttagttttttgggtagttgggattataggtatttgttattatgtttagttaatttttgtatttttggtagagattggggttttgttatgttggttaggtttgttttgaatttttgattttaggtgatttgtttgttttggttttttaaagtgttgggattataggttggtttttttttttaattaattatttttaaaatttattttagagatgggattttattgtgttgtttaggttggagggtggtggttatttataggtgtgattttgttattgattagtattgagttttgatttgttttaatttttatttgggttagtttaattatttttaggtaattaggttgatgtagaatttagtgtagatatttgattggtatattatattatagtttagaaattttgggattaagtgatttttttgttttagttttttaagtagttgggattataggtatatgttattatatttggttagtttgtttttttaataatttattaagtttttgttagttttttaggtgttgttttaggttttatagatgtagtattgaatagagaatagttttattgttttgtagtttatattttagtaaggttttattggtttaaataaattaaaagagaataaggttattttaggtttatatttagggttaatatttagtaggtatttattaatatggttgtgtaggttaattaaatatattaagatatttttaattttgttggtatatagttatggtttttagttttagggtatttttgttattttagtttttttttagggattttttagattttttgattttttatttaaagaggtattttttggtataatagagtttttaggagtttatttgagtgttttagttatttttaattttgataggttagtgtttgtgtatttgttgttgtgttataaatagttttattggttaggtgtagtggtttatgtttttaatattagtattttgggaggttgaggtgtgtagattatttgaggttaggagtttgagattagtttggttaatatggtgaaattttgtttttattaaaaatataaaaattagttgggtatggtggtaggtatttgtaattttagttatttaggaggttgaggtaggagaattatttgaatttgggaggtagaggttgtagtgagttgagattgtgttattgtattttagtttgattgatagagtgagattttgttttaaaaataaataaatagataaaaattgttgttaatatagtgaaattttgtttttattgaaaaaaaaaaaaaaaaaaaattagttgggtgtggtggtggttgtttgtagttttagttatttaggaggttgaggtaggagaatggtgtgaatttaggaggtaaagtttgtagtaagttaagattgtgttattgtattttagtttgggtgataaagtgagattgttttaaaaaaaaaaaaaaattttattgttttttttgtttaattttttttgttttttgaaatttagatgaaaggttattttttttaggaaattttttaattaattttttattattagtttggaaaagatttttggtatttttgagttaatttagttttttgtttgtttttaataataattttgtttattgtttaatttatataagggtgataatttattttatttgttttaatggtttttagttttataagggtagggtttgtatttgattgagttagttttttatttaatagttatattgagtttttggtttatttttgtaatattagtattttggaggttaaggtagtaggaggattgtttgaggttaggagtttaaaattagtttgagtaatatagtgagattttttatttttattaaaaaataaataaaaatagtagataggtttgatgatataagtgtgtagttttagttatttgggagattgaggtgggaggattatttgagtttaggagttggaggttgtagggagttatgattatgttattgtattttagtttgggtgatagatggagagattttgtttttatagtagatgtataaatattattgttttataattgtttatagtatttagtatggtaatatgttgtaagtattggggtttaggagtattaggttatattatgtagtttagatgggtaataggttatattatttaggtttgtgaaaatatattttatgatgtttgtataatgataaaattgtttagtgatttattttttagaatatatttttgttgttaagtaatgtatggttgtttttatgttgatatgattatatttataaagtttaaggaaagaaaatatttattgagtttattttttggtttttattatttattttataattgttattgagaataattttgttatataaagaatgtttaaatttgttttaattttatttatttatttatttgagatggagtttttttttgttgtttagattagattgtagtggtataattttggtttatttgtttaggttggagagaagtggtgtgtttggttataaagtatttttttaaatgatttatttgaaaaataaaattttgttttaggtatggtggtttatgtttgtaattttagtatgttgggagggtgaggtaagaggattgtttgagtttaggagtttaagaatagtttgggtaatatggtaaaattttgtttttattaaaaatataaaaaattagttaggtgtgatggtgtatgtttgtggttttagttatttgagaggttgaggtgggaggattgtttgagtttaggaggtagaggttttagtgagttaagattaagtttttgtattttagtttgggtaatagagtgagattttgttttttatttttaaaaaaagaaagaaaataagaaaaatttgggtttgggtatggtggtttatgtttgtaattttagtattttgggatgttgaggtgggtggattatttgaggttaggagtttgagagtagtttggttaatatggtgaaatttttttgtttttattaaaattataaaaattagttaggtgtggtggtggtatatgtttgtaattttagttatttgggaggttgaggtaggggaattatttgaatttgtgaggtgaaggttgtagttagttgagattgtattattgtattttagtttgggtgatagagtaagattttgttttaaaaaaaaaaaaaaaatttgtttttttgaattgtatttgattggattttttatttatgtataattttgt

SEQ ID NO: 327 - DNA, 6565 bp, Artificial Sequence
  chemically treated genomic DNA (Homo sapiens)
tgatttttaaattttataagggttattgtagttttttgaagtagaaaatgtagtttattttttgttagtttatgggttatattttgatttaagtatttttatggtgggtatttgtgtttattttgtagtttttgttagagattatgttagaagatggtggtatataggttgagtaagaggtggtgaggttgattggggtttattgattatagaataggtttttttagagggatatgaagtattgttaggttttttgagttttaagttgtggtttgtagtgttttggtgagtagttttgttaatttaattgttgaggtttagggttaagtatagtggggtatttaattttagtttgggttttagttattgtgtgtttagatgtgttaaagttatttttgtagtttattttgtattaattggagttttttataatttaggtgaattttagttttattgaggggaattgatttaaaatattttttatgttggtttttattgatttgggttaattgtgtgattgtggtggttggtatgaatttgatgaattttagggttagtatagtttagttaaatttttgtttattgttaaaggtttattattgttgttttttgtgggggtgtggttaggttaagtgttttgagttgtgttgttgtgtgtttgatatttgttttttttgattgtggtgatttagagggtgatttattggggtagggatgtttgtatgtgtaattttattaagagttaataggttatgattaaatttatttgtttatggggtggtatgagtttgttgaaatatttttagtgtattgttttgaggaagtaagttatataaattgtatggggtgtttttggggtttggttggtttggggtatggggttagtagtggtgtatatgttgagtaaggtgggtagggagttgtattgatggggttagtagaatgtgagttgagggaggatgatgtgttagttgaggggtgattgttaaaaatgtatttttttttttgttattatgtgaagaaggatgtgtttgtttttttttttattatgattttaaattttttgtggtttttttagttatgaggaattgtgagttaattaaattttttttttgtataaattgtttagttttgggtagttttttataagaatatgagaatggattaatataggtttaattttggttattttttaattttttaagttattggagttgattttttgggtagttttaatatgattattttttttattttttagttattagggtatattaggttttatgaattattgattttaatttttgggttggaggataggaaaatttttagtagaggttaattggagatatttgtttttttttaggatttttagaattattttaatattttgaaatgttttatttttagatattgggtaatgaatgttaagtataaaatattattgggtattgtggttaattaggaataatagagtagaagattatgatttattttagtttattttaaaatttatattttattgtatttagggttgggtttagaaaggggattattatttaattttagtaagttttaaaaaatagttgttttgattttatgtgaaattataggttattgattatattgtataatttatatttgggtttattgaatgatggtttaagataatttgtaaatttgatattatagtgagttatttaatgtttaatgtaattttttaaggtgatgaaattaattatttaggtagtagaataagttattgttatgtagtataaataattgtttattaattttttataattatttttgtgatattaagtagttttattaatagttttttttatataattttattttattatatattgatttttattatgagatatgatttttttgtggtgaatttatgttaaggtatttatttgagttttttgttgagaattaaattaattttattttttaaaggttgattttttttaggaatggagaatttaggtttttttatttataattattagattttgttatttataaaattataaagaaagtttaagtatattttgggaatatatatatatttttatgtattatatataatatgtttttgaataatattgtttttttttaatgttgatgagaaaaataattaatttttggttagggttattgtttgtgtggagtttgtatgttttttttatgtttgtatggggtttttttaggtattttagtttttttttatattttaaagatatgtatattattttttttaaatgtatgtatagtttatatttattttagtgttttttattagaagtgtttttggtttttatttagaagtttggtgatgtttttgtgattagtaatatgttttaggaatttaatttttgtgtatatttagtagtttatggtaaaattggttttgttttatattgttttatttaaagttatagtttttaagaatttatagatgatattgaggattatttatgtgtatagatatgatggatattttgatatttagtggattttttttaaaaaattgaatttaaaagttttattaaaatttatatttattatttattatttaaatttaattatttttttttttggtattatttaatttatatttaatatttagttttaattatttgtaattgtgtatgatatagtaaagattttggggaggttaagatgggtagattatgaggttaggagattgagattattttggttaatatggtgaaattttatttttattaaaaatataaaaaattagttaggtgtggtggtaggtgtttgtagttttagttatttaggaggttgaggtagaagaatggtgtgaatttgggaggtggagtttgtagtgagtgtagattgtattattgtattttagtttgggtgatagagtaagatttttttttaaaaaaaaaaaaaaaaaaagattttgagttaaagtgtttaagttgaatgtattttgttatttataagataaattgtgttaattttttgtggtttattttatttataaaatagagataataatagtttttgtttttagggttgttgtgggaattaaagatttagaataatgtttagtttttaattagtgttgttataattgtttgatataattgtattatatttgtgtattttgtagattgatattaaattatatttttaaaaataggtgtttaatgttttatttaattattttaaaatatgtttaattatgtttttattttatttttataatatttttataaaaattttttatatatagtgtttatttttggtttagttttttaggaaaataattttgagagttagttatttgaattaaagaaatattaatattattagattatattgggatttttgagattggtttttattaattttttagttatgggtttttgttattatttttattagtgatttaagtgttaaatttaaatgttttgtatttgttttattaaagagatgtagtatttgttttttttttattgtttttattttttttgttatgtttttttttataattataaatatttaggttttttaggttttaaatggggtattttttaatttttatatttttttttttggttatttttttttttttaatagtttaatttatttagatttttatgtttgaaattattttagatgttttagaggtgttttattattataatggtatattattttttatttttttatatgttatgttagtttttaaattgaaaatttgagtgtttatttttggtgtattatttttaaattttagatttttaaaatttagggttatgtaattttaaaaaatttttatttttttttttttattgtttttgtttaggttttattttttttagtagttgttttaaaggtttattttgttttttttttggagtgttaatttttattgaagtttttatttagttgttaattttgttttatgtttgataatttgtttgtgtgttgatatatataaaatttttaagataaaaattttttaataatggtaaatgaattttgggaattgtatatagattatatagatttataataagagaaaaggttttagattaatatggaaaattttttatttaattaatatttgtattggtaaattttattaagtaagattttatttaattttatattattttttattgaagaggttgtggttattttttggaaatatttgaatttatttttataagttagagaaatagtgttatttgaaatattattttttgggtttgagttttaaggtatttgataaatggagtgttgtgggtaggggtgaggtgttttttttagggttgggattttgttttgggtgagggtgttgtagggtaaagattttattgggtagtagaatttgggtagaaattagtaattgggttttttgtgtagtagaaaaggggaatttagttggggtttattttttttgttagtgtagattgtaagtttggttttatttttttgttgggagttggtttggtgtgttttgtttaggtattttgattgtgggtagtttgtgtttgtttgggttttattgttttggtttggtagatatttgagtggtggttagggtaggtttttgtttttgttgatgtttatgttttgggatatagtgatgatgtagtttagtgaattaattatgatagtagtgggaggatttttgagtttgtttgttatagtagaatgtgtggttaagtttggtgtgaaattgtggttgttttgtttttttgtttttatttgtgtaggtgaggttttgtttttttgttttggtgtatgtagggttgtggtgtgtttgtgtttgtagatgtttgggaattgtggttgtgggtttgtgttttttgttgggttttgttgttgggttgttatttttgttttgttatgttttgttggaagtttgtgttgggtggttttgttgtttttagtttagtttttgtgaggtaagtggttttgagttgatttttttagtttatgggaagtttgaaatttatttttttttttataggtgtagttgattaggtggattttggtgttgtagtggttgtagtgtttttagtgtttgtttttttgttttagttgttgttgtatgtagtaggttttgtttgggattgggtagggttattggggttgggggggtggggtttgtgggtaaggtgggtggaggtgtggattttttgtttgatgatagggttggaggaggaaggggtgggttgaagaaggggaaggtgggaagagtttagttggggttataaattgggtgaagtgttgaggttttagtatttttgtttgaggagataggtaaaggttatgtaggtttttaatggtaggtttgagataggaatttaggttttttgatttttattttgatgagggggtttgtgggtaaggggtgtgttttttaatttttattttttttttttttttttggtggttgaagagttttattgattttttaaaaaagtgttggattgggtgattagaagaaagttgtttttaggtttttagtttttaagattgtaatagtatggtttaatatttgaaattattatggttaaaagtagttatattgtgtagttttttagtgaatattttttgtagtttagattataaagtttgaaatatagtttgggtggataaagttttttaggatggtatagatgtgattaattatggagttttttttgttgttgttttttaatgtaataagtatgtttgtttgtttttaaattagagatattgttataggaaaagtttaagggtgattttttatttgggttatttgtatagtattttttagattgaggttgtggaagggtattgaagattggtgtttagttatttattgtgttttaatgtaggtggtagtttgggtgttttaaaattttgttttttttgtatatattttttttttaaaatgattattttttttttgttttttttgaggatgagttatgtttttatgaatttattaaaattttgtatttattatttaaagggtagttggtgaaggatttatgtatgtttttggtaagttttttgttaagaaaaaatttataattttgttatatttttagtgatgaatataaattttttaaataggaaatatttaaattgtaatgaatatgttaaaaatgatattgtttttttattatttatttttttttttttgtgtttttgttatataattgtttattttttagaggtattttatttagtatatgtaagtagggtgatttaagttttataattagagaaagttgaaggtttattgaattaagattggtagtagttttggttttaattaattttaaatatggtttgagttgttgaggtttttgattattagattttattttgttttttatggtgttaaaaatagtttatttatagggttttttagagttaaaagtagaggattttttgaagagtggatggtaaggaattttgttatttagttgtaaagtttaaattggtttatatatgttaggtttttttagagtagagataatatattattttttaatttttttgatatagg

SEQ ID NO: 328 - DNA, 6565 bp, Artificial Sequence
  chemically treated genomic DNA (Homo sapiens)
tttatattgggaaggttagaaaatgatgtgttatttttattttgagaaggtttgatgtatgtgaattaatttaaattttataattgaatgataaggttttttgttatttattttttaaagaattttttatttttagttttggaaaattttatgggtgaattgtttttaatattataaaagataaggtagagtttgatagttaggagttttagtaatttaagttgtgtttagaattaattgaaattaaggttgttattggttttgatttaatgagtttttagttttttttaattataaaatttgaattattttatttatatatgttaaataaaatatttttaagaaataaatagttatgtagtaaaggtatagaggggaaaagataggtaataaaagaatagtattatttttgatatgtttattgtaatttaagtgttttttgtttaaaaggtttatgtttattattaaagatgtgataagattatgaatttttttttggtagaaaatttgttaaaagtatatataagttttttattagttattttttaaatggtgggtgtaaaattttggtgaatttatgaaaatgtagtttgtttttaaaaaaaatagaagaggagtaattattttaagggagaaatatatatgaaaggaataagattttgaagtatttaagttgttatttatattaaaatatggtaggtggttaaatattagtttttaatgtttttttatagttttagtttgaaaaatattgtgtaggtgatttaagtgaggggttatttttgggttttttttgtggtagtatttttggtttaaaaataaataaatgtatttattgtgttgaaggatggtaataggaaggattttatgattagttatatttatattattttaagaaattttatttatttaaattgtattttagattttataatttaaattataaaaagtgtttattggggaattgtataatatgattgtttttaattgtagtgattttaaatattgagttatgttgttgtagttttaaaaattggagatttaagggtagtttttttttagttatttaatttagtatttttttaaaaaattagtaaaattttttgattattaaggaaaaaaaaaaaggatggaggttaaaagatgtattttttgtttataagtttttttattagaatgggagttaggagatttgagtttttgttttaggtttgttattaaaaatttgtataatttttgtttatttttttaaatggaagtattaaaattttagtgttttatttaatttgtagttttggttgggttttttttattttttttttttttagtttgttttttttttttttagttttattattgggtggagggtttatgtttttgtttgttttatttataagttttgtttttttagttttgatggttttgtttagttttagatagaatttattatgtgtggtggtagttggggtgggaaggtgggtgttgggggtgttgtggttgttgtagtgttagggtttatttggttggttgtatttgtggaggaggaggtggattttaggttttttgtagattggaagaattggtttaaaattgtttgttttgtaggggttgagttggaggtagtgaggttgtttgatgtaggtttttggtgagatatggtagggtaaggatggtagtttggtggtagggtttggtgaggagtgtgaatttgtggttgtagtttttaggtgtttgtgggtgtgagtatgttgtgattttgtgtgtgttggggtgggggggtggggttttgtttgtataaatagggatgagggggtggggtggttataattttgtgttaaatttgattgtgtgttttgttgtaatgagtgggtttggaggtttttttgttgttgttatggttggtttgttaaattgtattgttgttgtgttttagaatatgggtattggtaagaatggggatttgttttggttattgtttaggtatttgttgggttggggtgatgggatttaaatgggtgtaggttgtttatggttggggtatttgggtgggatgtgttaggttgatttttggtgagaggatggggttagatttgtggtttgtgttggtaggaagggtgggttttgattggattttttttttttgttgtgtgggaggtttagttgttgatttttgtttggattttgttgtttggtgaggtttttgttttgtggtgtttttgtttagggtaaagttttagttttggagaaaatattttatttttatttatagtgttttgtttgttaggtgttttagagtttgagtttaagggataatgttttgagtaatgttgtttttttaatttgtaggaatgaatttagatatttttagagaatgattataatttttttagtagaaggtaatgtgggattaagtagggttttgtttgatgaagtttattagtgtaaatgttagttaaatggaaagttttttgtgttaatttgggatttttttttttattatggatttgtatgatttgtatgtagtttttaaggtttatttattattattaaaaaatttttgttttagaaattttatgtatgttaatgtatgagtaaattattaggtatggggtagaattggtaattgggtggaggttttggtggaggttagtattttgaaaggaaaatagagtaggtttttggaatagttgttggaagagataaggtttgaataagggtagtggagaagagagggtaaaaattttttaaggttatatgattttggattttggagatttggaatttaaaggtgatgtattagggatgaatgtttagatttttagtttgaaagttggtgtgatatgtaaaggagtggagaataatgtattattgtaatgatgaggtgtttttaggatatttaggataattttaggtgtggggatttaggtgaattgaattgttggagggaagggaataattaaggaaaagaatgtgggggttgagagatgttttgtttaaaatttaagagatttggatatttatggttgtaagaggaggtatggtagaggaaatggaaatagtaagaaaggagtagatgttgtatttttttaatgggatagatataaggtatttgggtttgatatttaggttattggtagagatgatgataagagtttgtagttaaagaattgataaaagttagttttaaaaattttaatatagtttggtaatgttaatgtttttttggtttagatagttgatttttaaagttatttttttaagaaattgaattaaaagtggatgttatatgtaaaaagtttttatagaagtgttataagagtaggatagagatataattaaatatgttttaaggtaattgagtggaatattaagtatttatttttaaaagtatgatttaatattaatttataaagtatataaatataatataattgtattagatagttgtgatagtattgattagaggttgaatattattttaagtttttaatttttataataattttagaagtaggaattattgttatttttattttatagataaagtaaattataaggggttaatatgatttgttttgtggatgataaaatgtatttaatttgagtattttgatttagaatttttttttttttttttttttaagagggagttttgttttgttgtttaggttggagtgtagtggtgtgatttatgtttattgtaagttttgttttttgggtttatattatttttttgttttagttttttgagtagttgggattatagatgtttgttattatatttggttaattttttgtatttttagtagagatggggttttattgtgttagttaggatggttttgattttttgattttgtgatttgtttattttggtttttttagaatttttattatgttatatataattgtaaatgattaaaattaaatattggatataaattggataatgttaaagggaaaaatagttagatttaggtaatgagtgataagtatgaattttggtaagatttttaagtttagttttttaaaggagatttattaaatgttaggatgtttattatatttatgtatatagatagtttttaatgttatttgtgagtttttggaaattgtgattttaagtgaaataatgtagagtaaaattaattttattataggttattggatgtatataagagttaagtttttagggtatattgttggttataaaaatattattaaatttttaaatgaaggttaaaaatatttttaatagaaaatattgaagtaaatatgagttatatatatatttaagaagaataatgtgtatgtttttgggatgtggaaggaaattggaatatttggagaaattttatgtagatatgggaaaagtatgtagattttatatagatggtggttttggttaggaattgattattttttttattaatgttagaagaaaatgatgttatttaaggatatgttgtatataatatatgaaaatatatgtatatttttaaaatatatttaggttttttttgtgattttataggtaatagaatttggtgattatgggtaagaagatttgggttttttatttttgagaagaattgatttttaaagggtagaattaatttagtttttagtagagaatttaagtaagtattttaatataaatttattataagaaaattatgttttatagtggagattagtatatgataaaatgaaattgtataaaaggagttattgatgaagttgtttaatattataaaggtgattatagaaaattaataagtagttatttatattatatgataataatttattttattatttgagtaattgattttattattttgaaaagttatattaaatattaaatagtttattgtggtattagatttgtaagttattttgaattattatttagtaggtttaaatataaattatatagtgtaattaataatttgtagttttatataaagttaaaataattattttttgggatttgttaaaattaagtgatgattttttttttggatttaattttaaatgtaataaaatgtgaattttaggatgggttgaaatgggttataattttttattttgttatttttagttaattataatatttaataatattttgtatttaatatttattatttagtgtttgaaggtaaaatattttaaagtattgaaatggttttagagattttggagagaagtgggtatttttagttagtttttgttaagaatttttttgttttttaatttaggggttggagttagtagtttatgaagtttgatatgttttggtgattggagagtgggaggggtaattatattaagattgtttaggaagttaattttaatggtttgggaggttgaggggtggttagaattggatttgtgttaatttatttttatgtttttataaagaattgtttaagattgggtaatttgtataggaaagaggtttaattgatttatagttttttatggttggggaggttataggaaatttaaaattatggtggaaggggaagtaaatgtatttttttttatatggtggtaggaaggaaagtgtatttttaatagttattttttaattaatatattatttttttttaatttatattttattaattttattaatgtaattttttgtttattttatttaatatatatattgttgttagttttatattttgaattaattaaattttaaagatattttatatggtttatgtagtttatttttttaaagtaatatattgaaaatgttttgataggtttatattattttataaataaataggtttggttgtagtttattagtttttagtaagattatatatgtaagtatttttgttttggtgagttattttttaaattattatgattaaaaggaataagtattaagtatgtagtaatgtagtttaaaatgtttagtttagttatatttttatgggagatagtagtgataaatttttagtaataaatgaaagtttaattaagttatattaattttagggtttgttaagtttgtgttagttattgtggttatatgattaatttaagttaatagaaattggtgtaaagagtgttttagattaattttttttaataaagttaaaatttatttgagttgtaaaaaattttagttgatataaaataaattatgaaagtggttttaatgtatttgaatatataatagttaagatttaaattgggattagatattttattatgtttagttttaaattttaatagttaaattaataaaattgtttgttagaatattatgagttatagtttaaaatttaaaggatttggtggtgttttatatttttttagaggagtttgttttgtaattgataaattttgattaattttattattttttgtttagtttatatattgttattttttagtataatttttgatgaaggttgtaaagtaagtgtaagtatttattgtaaagatgtttaggttaaggtgtagtttatgagttggtaagaaatgggttatattttttattttagaaaattatgataatttttatgaaatttaagggttg

SEQ ID NO: 329 - DNA, 2891 bp, Artificial Sequence
  chemically treated genomic DNA (Homo sapiens)
  unsure (223, 366): unknown base
ttttttttttttgaattgtttttttttttggaggtggtggagggagagaaaagtttatttaaaatgtttttgggtgagggattaaggatgagaagaatgttttttgttttttatgttgtggaataatataaaataaaaaattttgagggaatatatattatatattaaatatagattattttagggagtaaataaattatgtgtggggttgggtaattagttnaagttgaagtgtaaataaaatgtgaatatatgtttgtgggttatatatagtgtatttttattagtatttagaaaaaattgtgagttagtgaattaggaaattaatgtttggaaggtagttaaattttaattagtttaagattnttttttttttttaaaaaaaggtatggaagtaatatttttttttttttttttgattagaattgatgtattttttgtgtatgattgtatttttaataataaaaggggaaagaggatttggaaaggaattaaatgtttggtttgtttggggaggaaagagttaatggttttttttataagggtttttgttgatttttttggtttggtttataagttttttatttgttttttttaggaagtttggttttgtggtttgggtattttttgttttttttatatttttttgtttagtatttttgattttttttaaatttggtagtttgagattgttgtaaattggtgttatagggtgtaaaggggatttgttttttttgaaatttggttgagaaattgggaattttgtgtgggaggtgtgggggtgggatggtggggtatagattggtagagagtaggtaattttttttttgttttagtttagttttggaataggtagatatattttagggttaaatagatgttttttgtatggggttttatggaagtttgagtaggtggggtaggagggttggtatttgttgttttggtagtaaattgggggatttagtttgggtggaaggtatttaatttagatagttgtgtatatataatgtataatatatgattttttttaataaatgtaatgggagtttatttataatgtgttttttaagtatatgtggtaatgtgttgttgggttattttaattattttaggtattgtttttttttttatgtttttattatttttttttatttatattaatattttatgttttgaatgtgtgtttattaatattttttttttttttattttttttgggatttttgattaaagtgtggttttttttttagttttagtgaggtgttttgtagtttggtatgtgtgtggtgtggtggtgggtgtgtagtgtgtttttggtgtggagggtagttgttttgtttgtgatgatttatatttataggataaggatgtggtttgttaaatagtattgttatggaggagtagtagagaaagggagagggtttgagagggagtaaaagaaaatggtaggtgtgtgtagttaatttatgtggtttttttattttgtttatattttagagttagagtgtttggttgtttggttgagttttttttttattttttttattttttttattttttttataagtgttttttttgggtttttaaagtagagggtgtgggggaaaagaaaaaagatttttttttgttaatttttgtttattggttttttataatgtgagggtttggatggttgaggatttttgagttgtgttgtttgtggttgttattgttgggttttggttgtttttggttttttttttgttttgagaagggtagggttttttagaggtttggtgggaaaaagaatggagggagggattgtgttgagtataaaagttggtttttggggttttatttaatttgttgtagtaattttagtgagaggtagagggagtgagtgggtggttggttagggtggaagagttgggtgagtagagttgtgttgtgggtgttttgggaagggagatttggagtgaatagggggttttgtttttggtttagtttttttgttgattttttaattagtggtttgtaatttttgttgtatttatgaaattttgtttatagtagtgggtggatattttgtattggaatttataatatttgagtaaagatgtgatttttttgatgtggggaggttattttgtttatttggggatatttttttgttgttgttaggatttgtttttttgaaaggttttttttgtagttgtttagatgttggattttttttgggtggaaaattaggtaagtattgaagtttatttgttttttaatttatttttttattattttaatgttgagatgagttgaatgtttaaatagggtgtttttttttttatttttgtgttattgatattttttttagagtagttatggtaattggggttggggtggggggtaatttagaattggattggggtaaagtgatttgttaagatggtagaggagaaggtagagggaaaatgggaatggtttttaagattatttttttgagatttttgttttatgaatatatttatgttgatttttggttggttggatatttttgttttattgtgttaattgttttttgtgttttggggggttgggggttgttttgtggtgggtagaaagttttttgtattttgagttttttggagtagggattgtatattgtttgtgtgagttagattgttttgtagttgttgatttgtttttgtttttgggagggtatttaaattttggtttattgtatttttgatagttggagatggatattgtggtgtgttttgtttgtttgtttttgtggtgattgtaatttgttttgatttttttaagaagttggtatttggttttttaaaaaataataatataatttaaaatttgggtttttagaggtgttaggatgtggtgttgggtaggtg

SEQ ID NO: 330 - DNA, 2891 bp, Artificial Sequence
  chemically treated genomic DNA (Homo sapiens)
  unsure (2526, 2669): unknown base
tgtttatttaatattatgttttaatatttttagagatttaggttttaaattgtattattgttttttaaaaagttaaatgttaattttttaaaaggattagggtgggttgtaattgttgtggggataggtgggtgggatgtgttgtagtgtttgtttttggttgttagaaatgtggtgagttgaaatttaaatgtttttttggagatggggataagttagtggttgtggagtgatttggtttatataggtgatatgtggtttttattttaaggagtttaggatgtaaggggttttttgtttattgtaaagtaatttttagttttttaaaatgtagagagtaattaatataataaagtaggaatgtttgattggttgggagttagtgtgaatatatttataaggtagaaattttgaaagggtagttttaaaaattatttttgttttttttttgtttttttttttgttattttgataagttattttattttgatttagttttggattattttttattttagttttaattattataattattttgagaaaagtgttaatagtgtaggaatgggagaaaagatattttatttaggtatttgatttattttagtattaaagtgataaaaaaataaattaaaaggtaagtggattttggtgtttatttggttttttatttgaaaaaaatttagtgtttaagtagttgtaaggagagttttttagagaagtgggttttggtagtggtggggaagtgtttttaaatgggtagaatagtttttttgtgttgggagagttgtgtttttgtttgggtgttgtaagttttagtgtaaagtgtttgtttgttgttatggataaagttttgtggatgtgataagggttgtggattgttggttgggggattagtgggagggttgggttagaggtgaagttttttatttgttttggatttttttttttaggatgtttatagtgtagttttgtttgtttggtttttttattttagttggttgtttgtttgttttttttgttttttgttggaattattatagtgagttagataaagttttgaaaattggtttttatatttagtgtgatttttttttttgtttttttttttgttaagtttttgagaagttttgttttttttgaggtaggaggggagttagggatggttggggtttggtggtggtggttgtgagtagtatagtttgggggtttttagttgtttagatttttgtattataaagggttggtgggtggagattagtgagagaggattttttttttttttttttatgttttttgttttgggaatttgggaggggtgtttatggggagggtggggagggtggggaaggtggggaggagatttagttgggtagttgagtattttagttttaggatgtaaatagagtaagagagttgtatgaattaattatgtgtgtttattatttttttttgtttttttttaaattttttttttttttttgttgtttttttgtagtagtattgtttgataaattgtatttttgttttgtgagtataaattattgtaggtggaatagttgttttttatattgagaatgtattgtgtgtttattgttatgttatgtgtgtattaggttgtagggtgttttgttaaggttggggaaagggttgtgttttgattaagagttttagggagagtggaggaaagaagggtattaatgggtgtgtgtttagagtgtgggatgttagtgtagatagggaggaatgatagaggtataaggaggaaaatgatgtttagaatgattaaaataatttagtaatgtattgttatgtatatttggagagtgtgttatgaataaatttttattgtatttgttggggggagttatgtattatgtattatgtatgtatagttatttggattggatattttttatttagattgagttttttaatttgttgttaaagtagtagatattggtttttttgttttgtttgtttaggtttttgtggggttttgtgtgggaggtgtttgtttagttttgagatgtgtttgtttgttttagagttgggttagggtgagagggaggttgtttgttttttgttagtttgtattttattgttttatttttatgttttttatatggagtttttaattttttagttaggttttagaagagataaattttttttgtgttttgtggtgttggtttgtaatagttttgggttgttgggtttgggagaaattaaaggtgttagatgggagaatatgggaggggtagggggtatttgaattgtgggattggattttttaaaaggggtaagtggagagtttgtggattgagttgggggagttagtagagatttttgtgaaaaaaattgttaatttttttttttttggataaattggatgtttaatttttttttaggttttttttttttttttattattggaaatgtggttatgtataaaaaatgtattgattttgattaaagaagaggagaggagtattatttttgtgtttttttttggggggggggggnagttttgagttaattaaaatttggttgttttttaggtattaattttttagtttattgatttataattttttttgaatattagtgaaagtgtattgtatgtaatttgtaaatgtgtatttatattttatttatgttttgatttnagttagttgtttagttttatatatgatttgtttgttttttgaaatgatttatatttaatatataatgtatatttttttgggattttttattttgtgttattttatggtatgaaaaataaaaaatattttttttatttttggttttttatttaaaggtattttaagtaaatttttttttttttttattatttttaaaagagaaaataatttgggggaaagggg

SEQ ID NO: 331 - DNA, 1092 bp, Artificial Sequence
  chemically treated genomic DNA (Homo sapiens)
aagttttttttttattatttaagaaggtatttaggtttttttgtgttaggttttaggtaaagtgttggattatttagtaattgggtttagtagtaggatggttttagattgaggttttagggttaaaggattatttttttttttagtgttggtttgggaaaggtaagttttgggtgggagtgtatgttgtgtttttgaagtttggtttttttgttatgtttattttttgtttttattttgtgtttttttaggtttttttttggtgaattggatgttttgttagttttttattttgtgtttttggttgtggtttgggttttttgtaaagttgttgttattttggagggtttagttagtgggtttttggaggttggttgggtaggtgtggtgtgtggtaggagttgggtgtgtatggttattgtgtgtggaggagatattgttttgttgtgatgggggtttggggtgtttttttatgttgtaggtaagtggggtggtggttgtggtatttgtttattgggagttttttttttttttttttgttgttgttgttttgtatttagtttgggggaggatagaagaaaaaggaggtagaatggatttttttggtttttttttgtggttgggggtgggttagggtgggttgtgttgtttaggtagttttgttgtgttgttaggtagtttggttgttggtgtgggtgatgttggtgttggggtgggagttgtgagggtgggaggttttggggtgtttttgggatgtggagttagtagggttttgatttgaaaaatgatggtaaagtgtgtttttgattgtttttgagtattttatattttttagatttagggtgtttttatttttagttggaagtttagtttagagtaatggtgttattaaaaggggtgtgttggatgtgaaaatattttttggaagtatttataagtttgtaggaaatatgttttttttatttttttattttgttttttttattatttattttaagaagtaatagaatttgtgtagagtgtgttttaagttatattgtatgtttatttttgtttatgttgaatttggtgtatatttgtgagaataagttt

SEQ ID NO: 332 - DNA, 1092 bp, Artificial Sequence
  chemically treated genomic DNA (Homo sapiens)
aagtttatttttataagtatatattgagtttaatataaataaaaataaatatatagtgtaatttaaaatatattttgtataggttttgttgttttttgaaatgggtaatgaagggagtagagtaagaaaataaggaaaatatattttttgtaggtttataaatatttttaaagggtatttttatatttaatatattttttttagtggtattattgttttaagttgggtttttagttgggaataaaggtgttttgggtttgaaaggtgtgaggtgtttagaagtagttaagaatatgttttgttgttgttttttaagttagaattttgttaattttatgttttggaaatgttttagggttttttatttttgtggtttttgttttagtgttggtattgtttatgttggtgattaggttgtttagtaatatggtagggttgtttgggtaatgtggtttattttggtttgtttttgattataggggaaggttaaggggatttattttatttttttttttttttgtttttttttgagttggatgtagagtagtagtagtaggagaaggaagggaaagtttttggtgggtaggtattgtagttgttgttttgtttgtttatggtgtgaaggagtgttttgggtttttattgtggtagggtagtgttttttttatgtgtggtagttgtgtgtgtttagtttttattgtgtattatgtttgtttggttagtttttgggagtttgttggttgggttttttgggatggtagtggttttgtgagggatttgggttgtggttgaggatgtagagtaggagattgatagagtatttggtttattgggagaagatttggaaaggtgtgggatgggggtaggaagtgggtgtggtgagggagttaggttttgggggtgtggtgtgtgtttttgtttggagtttgttttttttggattagtgttgaggagaggagtggttttttggttttgggattttaatttgaggttattttgttattgaatttaattattgggtagtttagtattttatttggggtttagtatagaaagatttgaatgtttttttggatgatgaaggggaagttt

SEQ ID NO: 333 - DNA, 5203 bp, Artificial Sequence
  chemically treated genomic DNA (Homo sapiens)
agggaatttaatgtttttttggggtagaagggggtagtgtgtgtgaggtggaaggatagttatttttgttgtataaatttttttgtgggttgtgttgtgtgtgtaggggttggatgttatttggtgttagagttgggtttgaggagtggggtttggttgggaatgagggttgttagtttgggtggtgttatttgttgttttattttttattttttttttttttgtgaggaattagaggtattgggttgtgtgggttgagaatttttaaattttttttggttgtatttggttgagttaatttgtagtttttgttagtttttttgttttttgggtagtggttttttttgttagttaggtttggaagttattttttgtgagattgggttaggaagtgatgaaaagtgttgaattgtttttaaattgaaaatatttttttttttttttttggagatagtgttgataaatatatgggattttggtttttgatttttggttgttgtttttgtttttttgttgttaataaaatttgtattgagttttttagtgttttgattaataggtagattaatttttattggggttgggaatagtttgttttaattaatgttattttaaaagtttgttaggatgtgtttagttttggttttttggatgtttgagtgagttagttatgatatttgttttttttttttttttagttttaaattttttagtaaagtttttagtttttgtttgtttgtttttaggtttataatgggataaattgtaggattgggttgttggtttttagaataggtagtggtttagagaggggatatttagggagaagggattgaggtggttttgatttgtttgttttttttttgaagttgaatttttgttttttgggggtagaggttatagggaaaagagagatggggggattgttatagggtgatgaaatggaaagtaaatttttttaggaattttatttgtaaaaattggagagtgttgttgattttagttgttttatatgttaggagttttaaatttaatttttatttggataatagtatggagggattgggaggtaaagttttgggagtttgatttgttgggttgttaggaatttttttgttgggagattttattggataatgttattttaaaggtattttgggggtgggtagggagaagatagagagagaaagagagagagagagagagagagagagagagagagagagataggttggttttttagagtgaatggaagaggattgaggattgaatttagggagtttttagtattggttatttggtaggaggtgaggaagggtgagggtattgtggtttttttttaagttgagtagtggttatagtttgaaggtgttatggggtggttttgggatttttttggtttttttaggttttgggtttggtgaggttgttgggttagtgggaattggtaggttgttggagaaaggagagggataaaggtttggaagtgggggaggtattagggattgggtggttgggatgggagtttttgtttttagggtttattggatttgtttgttagttttgtggataagggattttatttttttagggtttgtaaaaagagagatgtttggggtattataaagtgatgtaggtgtttgttaagattttttttttttaaaaaatgttagtttttattttttttagtgtgttggtgttgtgtttttgtttgattggggaaagagagagtttggaggtgttagaattgttagaattttggatgggaggtttttggttttgaagttgggagttggaggtatttttttttagaagtgggtatttttttgtttttttgaaggtttgatggggtgggtataggggaatgttagggattggtgtgggtgagatgtttgttttattttatgttgatgtattaatattggttagaagttttgggtaggttttggtgagttatggttttttagtgggattttttttatgtagatagttttgttattgggtgggatgattttggtggtttttgtgggaatgtatttgttggtttgagaggttttttttttggttatagggggtggagggtaggggggaataggggtttgtggggaggtggggaaaggagatagaatttaaagtgtaatttttgttgtttttttgtgttttggagggtagtaagtgggttttgggtgtgttggtagttgtaattaaaatggtgatttgtgagttgttttggttttgtatatatttttggtaattgtgtttgtattttagttttggtttttatatttttaggttgttttgtttttagagttggtatttggtagagggagtgaggttttttatgaggtagaatagtatttttattttttttgagattagtttagagagaatgaggaaattttatttttatttttttttttttaaattttgaaaatttggttttattttggggttgaatttttttttttaaatattgatatatgggaagtagttaagttttttttgttttttgtttgtgtggaggagtttttaggagttttttttggagtttttttttttatttaatgatgttagtggtatttattttttgttttttgttttttttgattttttgttaaaatttttttttgtagtgagatgggggttggaggggtgggagaaggagttgatttaaagagttagtgttttggggggaaatagtaataagattatggttgtttttttttgaggtaaagtttaagaaggtgttaatttatttggttgttaattgagaggttgtaaaaatgatatttgtttttagtttggatagaattattttttttttttttgtttttttgtaagttttttgtttatgtatagtggatttgagttttgagtttaagtttttttaatgtttgtttggaaagtaaaaggagagagaaagagaaagttgatttttgttggtttgggatttagggttgtggttttatttgttggtattttttgaaagttgtgtttttgtgaaatgaaattttgtttaggaggttgtggatttggatatttggtgttattttttttatttttgatttaggtttttttttggtgttgtgagtttttggggaagggttagagttggtagttttttttagtttggggaggggagagggttatgtgattttatttttggttagggttggggaggtttttgttttttgggagttttgtttgggttttttggttgtagggttgttgggttttaggtaggaatgagagggtgaggtttatatgtggtttggtggtttagggtggtttgtagtgtttttattgttttggttgttaggggttgtggtgatgtggttagttagtagtgagtttaggttgtgtagattttattgatgagttttgatttttagtattttttttaagttaagaagagtttagtgtattttttggttgttttattttagtttttttgttttagttttttagttttatttttttttgttttgttttggggtgtgtatagtagtttaggtttttttttttttttttggttttgtggtttgaagttgttgagagagtttgggatagtgtaggattaggtagttgtttgtttttttgttattttaattgtaggttttgaggggtgtttttggagtgtattgaggtgtgttttaattgtgtggtatttaataaatggatttttggtgtgtggttagaagagaaaagttatttatttatttttttttttggttttttggtaatagttgaaggggagttgtttttgtggattgagtagatttaggagagggagttgtggtgtggagatatatgtattatatatagatgattggtggtatatatgatatatgttgatatattgatattgttagtgggatatatatatatatatatatatatatatatatatatatagagagagagagagaattttttttagtattggttatttgtttttttatttaggtttttattttttttttttttttattttttttggttttttttttttttgggtgttgtgaaaagtagttgtatttagttaataaatggtatgtgggagaagttggtgagtgtttggtgaggattttttagggttttttataagaattttttgtatataaagtaagtggtgtgtttatttgggtttttttagttagagttgtgtttttgttttgttgtgtattgtggtttttgaaaggagaaaggagagaagaaagggtggggagagtggggtggaggatttggataggttttggaggtttgggttggggaggtttttggttttgtttagtttttggtttggtaatttttttttggtttaggttttgttgtggtttttgtagttggaatggagttgttaggatttagtgatgtttttgttttttttttttttttttaaggggttaggtgggttggggtgtggttgttgttgtgttttgtgttttggggttttggttgggatggggtgggggtgggtgggggtggggtggtaggttatgttgttttggagttggtaagaaaggatagtatagaaatttgtattttttgaggattgggagttttgagtttagtttagggggagtgggggtgtgatttttaatttagaaatttttatttgattgtttaagtttgtggtagtagggtgggttgtgttgaattttggtgtgtgtggagtggggagatgtaggtgagtgttagagtttgggtttgggggttttgtgttggggagaggagttgggatttattggtggagttgaaaataagtgtatttatatttaaataaatggattaattgtattaggtggggagagggagtatttaattggttggtgtgaggttttggtgttgttttgtataaagtaatattttgtgtgagagtgagtggtgtatttgtatgttgtggagtgattagtgggtttgaaaagggaattgtggtttggttttattttttgttttggtttaggtgtaggaggaagtgttttgttggaggatgatgatagaggttaggttttgttaatgggttagtgaggagtggtggaggtgaggttgggtgttggtatatatatattaatatatttgagttattattaattagtataggtgtgttggttgtagttattttttttatttatattttttattttttattttttagttgttgatagtttattttattgttaatttttgttttttttttagg

SEQ ID NO: 334 - DNA, 5203 bp, Artificial Sequence
  chemically treated genomic DNA (Homo sapiens)
tttgggaaggagatagagattgataataaaatgggttgttagtggttggagagtgagagataaagagtgtgggtgagggaagtggttgtagttagtatatttatgttgattggtgatggtttaagtgtgttaatgtgtgtgtgttggtgtttggttttgtttttattgttttttattggtttattagtgaagtttgatttttgttattattttttagtaaaatatttttttttgtgtttgaattagagtgggaaatgaggttgagttatggttttttttttaaatttattaattattttgtaatatgtaaatgtattgtttgtttttatataaaatattgttttatgtaaagtagtgttggggttttgtgttagttgattggatgttttttttttttgtttggtgtaattggtttgtttgtttgaatatgaatatatttgtttttggttttgttggtgggttttggtttttttttttggtgtagggtttttgagtttgggttttggtgtttgtttgtatttttttgttttgtgtatgttgagatttggtgtggtttgttttgttgttgtgaatttgagtggttaagtgaaggtttttgggttgggggttgtgtttttattttttttaagttggatttgggatttttagtttttggagggtgtaagtttttgtgttgtttttttttgttaattttaggatagtgtggtttgttgttttgtttttgtttgtttttattttattttagttggggttttaagatatagagtatagtggtggttgtattttagtttatttggttttttggaagaagaggaaaggggtgggagtgttattgggttttggtagttttattttagttgtggaggttgtggtgaagtttaggttgagaggaggttgttgggttgagaattaaatgaggttagaggtttttttagtttaagtttttagggtttgtttaaattttttattttgttttttttgttttttttttttttttttttttttttggaagttgtggtgtgtagtggagtagaggtatagttttggttggagaggtttgagtaaatatgttatttattttgtgtatagagggtttttgtgaaaagttttgaagagtttttattaaatatttattaattttttttatgtgttatttgttgattaagtgtggttgttttttgtagtgtttgagaggaggggaagttaggggagataagaggggagggggagtggaagtttgggtgggggggtggatgattaatgttgggagggattttttttttttttttgtgtgtgtgtgtgtgtgtgtgtgtgtgtgtgtgtgtgttttattggtgatgttggtatgttagtgtgtgttgtgtgtgttattggttatttgtgtgtggtgtgtgtgtttttgtattatgatttttttttttgggtttgtttagtttatggaggtagtttttttttagttgttgttagaaaattggggaggaaagtaagtaaatggttttttttttttgattatatattagaagtttatttgttgaatgttgtatgattaggatatattttagtatattttaaaggtgttttttggagtttgtagttaaggtgataggagagtgagtggttgtttggttttgtgttgttttgagtttttttggtggttttgggttatggagttgggaaggagaaggaaggtttgggttgttgtatatattttaggatagggtgagggggaatagggttgaagagttgaggtagggaggttgaaatgaagtagttgaagggtatgttagattttttttgatttagggaaagtgttgaaagttagagtttattaataaaatttgtgtgatttgaatttgttgttgattggttgtgttgttgtagtttttggtagttgggatagtgaggatgttgtaagttgttttgggttgttgggttatatgtgggttttatttttttgtttttgtttgggatttagtagttttgtgattaaggagtttgggtagggtttttgggaagtaaaggtttttttggttttagttagaggtggggttgtataatttttttttttttttgggttggggagggttgttggttttaatttttttttgggagtttgtagtgttgggaggaaatttgggttagaggtgaaggaggtggtgttgggtgtttaggtttgtggttttttgggtgaggttttattttgtaggagtgtgatttttggaggatgttggtaagtggggttgtggttttgagttttagattagtgaaagttggttttttttttttttttttttttattttttaagtgagtattaaagaagtttggatttaagatttaagtttgttgtgtatgagtgagggatttgtgggggggtgggggggggggaagtgattttgtttgaattggaggtgagtattatttttataattttttaattagtgattgagtggattagtatttttttaagttttgttttggaaagaagtagttgtaattttgttgttatttttttttagggtattggttttttgaattagtttttttttttatttttttaatttttattttgttgtggagaaaagttttaataaaaaattagaaaaggtaaggagtgaggagtgaatgttattgatgttattgggtggggaagggggttttgggaaagatttttggaaatttttttgtataaataaaaaataaaaaggatttggttgttttttatgtgttaatatttggggaggggagtttaattttagaatgaggttgagtttttaaagtttaaggagagaggggtgagagtgagatttttttgttttttttggattggttttaaggaaggtgggggtgttgttttattttgtggggagttttattttttttgttaagtattggttttgggggtgaagtggtttaggggtgtgggggttgagattgaggtgtgggtgtggttgttagaggtgtgtataaaattgagataatttgtaggttgttattttaattgtggttattaatatgtttgaggtttatttgttgttttttaagatgtgggggggtggtggggattgtgttttaggttttgttttttttttttgtttttttataggtttttgtttttttttattttttgttttttgtggttagagggaggattttttaggttggtgggtgtgtttttgtgggggttgttggggttgttttatttggtagtggggttgtttgtgtggagggagttttgttgggggattgtggtttgttagagtttgtttagagtttttagttagtattgatgtgttaatatgaggtgaggtaagtattttatttgtattgatttttggtatttttttgtgtttattttattaggtttttggggaggtaaagaagtgtttatttttggggggaagtgtttttagtttttagttttagaattaagagttttttatttggagttttgatagttttgatatttttaaattttttttttttttggttaagtagaggtgtagtgttggtgtgttggaaagggtgaagattggtattttttggagaaggaaagttttggtagatatttgtgttattttgtagtgttttaaatgtttttttttttgtagattttgggaaggtgggattttttgtttgtggagttggtaaatgggtttagtgagttttaaaggtaaaggtttttattttggttgtttagtttttggtgttttttttatttttaggtttttgttttttttttttttttagtaatttgttggtttttgttaatttggtagttttgttgagtttagagtttagaaaagttaagaagattttagagttgttttgtggtatttttaggttgtggttattgtttggtttggggggaagttgtggtgtttttgtttttttttgttttttgttaaatggttagtgttaggggttttttgggtttagtttttagtttttttttgtttgttttgggaggttagtttgtttttttttttttttttttttttttttttttttttttttttttttttttgttttttttttgtttatttttaaaatatttttaaaataatattgtttagtggagttttttagtaaagggatttttagtagtttagtgggttagatttttaaggttttgttttttagtttttttatgttgttgtttagataggagttaggtttaaaatttttgatatgtaggataattgaaattagtggtattttttgatttttgtaaatagggtttttagaaaagtttgttttttattttattattttgtgatgatttttttattttttttttttttgtaatttttgtttttaagaggtaagagtttagttttaaaggaaaagtaagtaagttaaggttattttagttttttttttttggatattttttttttaaattgttgtttattttaaaggttaatgatttggttttgtgatttgttttgttgtagatttgggaataggtaggtgggaattgggggttttattgggggatttgaggttggggagggggagggagtaaatgttatggttggtttgtttaagtatttagggaattgaagttaagtgtattttgatgggtttttaaaatgatattgattaggataagttgtttttaattttagtaagagttaatttgtttgttaattaaggtattaaggggtttaatgtgagttttattagtgataggagaatagaggtggtagttagggattaaaagttgggattttatatatttgttagtgttatttttaaaaaaaaaaaaaaaagtatttttaatttgaaaataatttggtgttttttgttattttttaatttagttttatagagggtgatttttaaatttggttagtggggaaaattgttgtttgggggatagaggggttgataggaattgtgggttggtttagttgaatgtggttggggagaatttaagaatttttagtttgtgtggtttgatgtttttgattttttatgagaggaaagggaatgaaaaatgaagtaataaatgatattatttaggttggtagtttttgtttttggttagattttgttttttaggtttggttttggtgttgggtggtgtttagtttttgtatgtgtggtgtggtttgtgggaaagtttgtgtagtgagagtgattgtttttttgttttgtgtgtgttgtttttttttgttttggaggggtgttgggtttttt

SEQ ID NO: 335 - DNA, 8085 bp, Artificial Sequence
  chemically treated genomic DNA (Homo sapiens)
  unsure (2545): unknown base
gttttatgatttaattattttttaatatttttttttattaagattattatattggtgattgggttttgatatatagatttggggagaatataaatatttatattatagtatttattaatttatttagttattttattgttaggtatttatttagaaaaaatgaaaatatatgtttatataaagatttgtataatatttttatagtagttttatttataatattaaaaaaattggaaataatttagatatttatttatagttaaatggataaataaattatagtatataaataaaaagaataaaaagaattaattattgatatatattataatttagttgaattttaaaataattatgttgagtgagagaaattaaatgaaaaaaagatatattatattatatataattttaagaaataaaatttaatttatttggtatttagatttttatttttatattagttttaaataaaaagttttaaatttttttggataaatggttgattttatgattggggtaggaaatatataagatgagtttgatgagtttgtagtattttgtaatattagaaagtaggaaagtttatatatatatatatatatatataatatagagagtgggttaaggagtataagagttaattgaaaaagtttttagtgttaaaaattggaaaaatttgagtaataaagtatttatgaatttatataaagaaaagattgaataaagaagtaaatgggggagaagaagtaaattttttttatagaattttaaataaattatgtagatattttattttaaaggagggttagtataattttttatttttttatatttttttaagtgatttataatgatttttttttaaagagtatagagtatgtaaagagggaaaaaagagtaattatgtaatggagaaatttgataaatattattttagttaggtgatggagaataatattaatagttataagttatgttgataatatgtattttttatatgatgtaataaatatagtatattatttttttgatttttattttgttaaaatttaaaattttagtttatttatgaggatatattaaattttaatagaagggtattttgtaatatattttattagtatttttaaggattgttaaggttattaaatataaggaaaatttgagaaatttttatagttaagaggagtataagatattataataattaaatgtggtgttttggatggaattttggaaaggaaaaaggatattaagtgaaaatgaagaaaatttaaataaattatgaatattagttaataataatttattagtattagtttattaattgtaataaatgtattttattaatttaaaatgttaatagagaaaattgtataaatgatatatgagtattttttatattatttgtttaatttttttgtaaatttaaaattgttttttaaaagtaaaatttattaataaaatatttaaagtaaatagatttaaaaggtatatgtaaatgtataatttaatgtttaataaattagatataaatatttttaaaaatttaatatttggtgatagaaagtagattagtggtttgttagaaagtggtgattagtattaggggaaggggatgggatagaatagtatgaagggatttaaaaaatggtatgaggaaatttttggaggtaaagggtatgtttattattttagttttataggtttaataataaattatataatttaaatatatgtagtttattatatgataattatattttgataaagtggtttttttttttaaattatagaaaaaatatttttatatttaaatttttttttttaaaaatagtttttaggaatatttgaagttagttttattatatttgaatttaattagtgaattttgtttatttaaagatttatatatttgggaagtttttgtgttaaaaatgttaattatttagtattaaaatttatggaataatggtgatttaggatatgttggatatttttattgttgtttttttattttaagatttttaattttttggaaataatttttttagatattttgataagggaattattataattaattaaaattaagttaaatatagtttgttagatttaaaatgaggttaagtgttaattttatagtagtgattggaaaattaaattatatggtatttgatatttaaaattatatttttaagaaggttgttatttgatgttttgggtttgggttatagtatttaattttataatattgggtaattttgtgttttagtttttttaattatgaaattgggataatagtatttattttgtgagattgttgaaggattatagttaatataggtaaaaggtttataagattatttggtaatgttgttttgattttataaattttatatattgtgtggtattagttattaggaaaatataaataaattagtgagatattattttatatatttggggggttataataaaaaagatagataaaaaatgttgttaaagatgtgaagaaattaggatttttatttattgttggtgnaaatgtaagaagtataattatttgaattatagtttggtagttattttaaagattatatttagagttgttatatgaattagtaattttatttttatgtatatatttaggagaaaggaaaatatatgttgtataaaaatttgtatatgaatgtttattagtaggattttttatggtagttaaaaggtgtaaataatttaaatgtttaataattgatagagatggataaataaaatgtggtttatttatataatgaaatattatttgttaataaaaaggagtgaaggagtgaagtattgatttatgtggaatatggatgaattttgatttaaaatagttaaattataggtataaaaagtatattagtggttgttgggagatttaggtggaaatgtggaataattgttagtgggtattgagattttagagttatatttatgttataaaattaatagtgttgatggttgtataattttgagtatatgaaaaattaatgaattgatattttgagtgagttgtatgatattggaattatattttaataaagtatggtaattgttttaagataggttggaaagagaaagtttgaaaataataataatgatattaataaattagtttatttttttagttttatatatttttgtgtttatatttgtttttgttttatttataatggtttttttgtagttgttatattatattttgttatttgatgtttggtgaatattttatatttgttttttagaattttttttattttttttttatttgtttaatttttatatatttaaaattaattagagtaaattatttattagaataattaattttaaattttagtaatttaatatgataaaggtttgttttttatttatatagtttttttttagatgattgaggggtttaggttttttatttttagtggtttttttattttttggagttttttgtattttttatatatggttgagataaattatgagttattagtatagttagattttgaggttttataagaaaatttgtaaattatttattttgttttgaataaggtatatttaagatgatgttaaaatatttaatggttttgggttaaatatagtttatgattgtgtatttaaaatatatattgtaatatttttttttttttttattgattttatgaatttagtggggatttattttataagtttaaagataattattttttagattaagaatatttagggtaaaaagtattgtttaatatttttattgaggatgttatgatgtagtatattgtataagttggagttaaaggaaattttttttaaagtgttatttattaaaaattggaatatattttttaagataaattgaagtgtggtatataatatttaaatttttattatagatatagaggtgttattattttttatttttaaatttttttgttatgttgaggatatttaagaggagtaggatatgttggttgtagtaggagaaatttgaaagtatttatttttatggaatttataagggagagaattttttattttagtattgtttttgatatatttattattttaaaagataatgtagttaaatgtttttttttgtgttaaatttttataaaattgaaattttaaaatggtgataaaaattttatttttgatagaatttatttatttttttaattagatagggtataatttttaatttgtaaaataaaatgtaatatgtttatgaggttttattttaaagaatttgttattgagagtagtatttagaataatgggtggaaatgttaattttagagttttagattttattggtaattggggtagggaggggttttgggtggggtttttttagaggaggaggtgttgttagaaagttgtttggttagtttatagttgttattaattggggtaagttttgttgtatttgtgtgtgtgggtggtatttttaatgagaattagttttatttgttatttgagtgaaatttataatttgaggtggttagtgtttttgtattattgggatttgagatttttggagatgattgttgtttgtagtatggagttagtagaagtttgattttttttgggaatgggttgtattgagaggtttgattagttttagggttttagtgagggggtagtggaatttagtgagggattgagagttttatagtatgtatgagtttgatgttagagaaaaagttgggagataaaggagttgtgtgttattaaattgttgttgtagttgtagttatttaagtgttggatttgtgagtattttgtgtttttagtttttggatagaagttggagaatttttttggagaattttttgagttaggagatgagattttttaataattattatttttttttgtgttttttatttgttgtttgttgggataaatgatagttatagtttttttgatgataggatggaggttaagggtaggagttgattagtgttgtttttttttgtttttgatttaggaggtggagatttttttggtttagttatatttaatatttatttttttttttttttgtttttatatttttgaaatttttttttttttttttttttttttttttttggagatgggggaggagaaaaggggagtttagttgttatgattgagttgaaggtaaagggtttttgggttttttatgtggtgggtggtttgtttttttttgaggttggatttttattgttgtgttgtttagttgtaggtttgtttttggggagttagattttggatattttgtttgaagttttggttatatttatttttttggatgggttattttttttttggttttgttagggataggatttttttgatgaaaagatgtaggattagtagttgttgttggatgtggagggtgtatattttagagttgaagttataaggggtgttggaggtagtagttttagttttttagaaaaggatagtggattgttggatagtgttttggatattttgttggtgtttttaggttttgggtagagttaatttagtttttttgtttgtgaggttattagtttttggtgtttgtttggttttgaattttttgaagatttattggttgtttttgttatttagtgggtgttgtttttgtttatgagttggtttgggtgtaaggttggagatagttttgggatggtagttgtttataaagtgttgttttggggtttgttattagtttggtagttgttgtttttggtttttgagagtttttattggtttggggttttagtgaagttgtttttgtaggttgttgtggtggaggttgaggaggaggatggttttgagtttgaggagtttgtgggtttgtttttgaagggtaaattttgggttttgggtggtgtggtggttggaggaggagttgtggttgttttgttggggtggtagtaggaggtgttgttttggtttttaaggaagatttttgttttttagtgtttagggttgttttggtggagtaggatgtgttgattgtttgggatgtttttgttggttattatggtgatggattttatttatgtgtttattttgttttttaattatgttttattggtagtttgtatttggtagttgttggaagatgaaagttatgatggtggggttggggttgttagtgtttttgttttgttgtggagtttattttgtgttttgtttattttggttgttgtaggtgatttttttgattgtgtgtatttgtttgatgttgagtttaaggatgatgtgtattttttttatagtgatttttagttgtttgttttaaagataaaggaggaggaggaaggtgtggaggtttttgtgtgttttttgtgtttttattttgtggttggtgttaattttgtagtttttttggattttttgttggggttattgtttttgttgttgttgtgagtgattttatttagatttggggaagtggtggtgatggttgtatttgttagtgttttagttttgtttgtgttttttttggggttgattttggagtgtattttgtataaagtggagggtgtgttgttttagtagggtttgtttgtgttgttgttttgtaaggtgttgggtgtgagtggttgtttgtttttgtgggatggtttgttttttatttttgtttttgttgttgttgttggggtggtttttgtgttttattttgtatttggttttaatgggtttttgtagtttggttattaggttgttgtgtttaaggagggtttgttgtaggtttatttgttttattttaattatttgaggtgagggtttgggatggggtatgtttagtgtgtttgggagtagtggttttgttggtggtggtggttgttaatttttagttttagttttagtgtattgttgtgttttttggggtggttggagagggtgggtagtgggatatagtataggggtagttgtttttttttttttttttttttttttttatttttggggatatgaaggtgggtgtagaatatattatttttggggtgtgtttttttgaaagttgtttttttgtttgttttttaattttttgaattttttagattttgaagtagaattaattttgatttaaaatgtgtagtgttatattaggtttgttgtagtttagtggggtagaaagtgtgtggtgagttgggggttttatgaaatgttttttttttagaagaaggatgtttattaggagtgtttgttttggagaggagttaaggtattgtttttttgggaggggtgggatttgagaggtggttggttagaattgaaagtagtattattttagggatttgaatattttagtggtttagtttttttaagaattttaagattaaaattaagtttatgtgggaaatgtttaaattgtggatttaaatgtttgttattgtattgtattgtttttttattattgtttgttatttattataattttttttatatataggtttaaaaaatattattttgtatattgaagtaatggaatgtaaaaaaagaatgttttgtttggaattttatgttgtgaataggtaaaatagtgttagtgtattggataatattttaaaatgataaatatatatttgtttaagtaagtaatgattatagggttgtgttttaaaaatttaaaattaaaatattgtaaagtattattgaatttttaaagttaaattatatttgttttgatttagtatatagataggaaggatataatattttatttgttaaagattaaattgtttttatataaagagttttgtagaaagatttttttttaattgattttaattttttaggatataatattatatattaattattgtttttttatattggtgttattgatgaatggttaattatttgtaagtatggtgaatttagttatggatagtttattattaagtttagtttgtatgttttttaagtgtatatatatagttttgtttttaaaatttttttttattttgttaatattggtttaagaaatttttagtattagatagtggtgtatttaaaaataaatggagtattttgttttgtattttaagg

SEQ ID NO: 336 - DNA, 8085 bp, Artificial Sequence
  chemically treated genomic DNA (Homo sapiens)
  unsure (5541): unknown base
ttttgaaatgtaaaataaagtattttatttatttttaagtgtattattatttaatattaaaggttttttaaattagtattaatagggtgaaaggagattttaaaaatagaattgtatatatatatttgaaagatatgtaaattaaatttggtaatagattatttgtaattggatttattatatttgtaaatgattagttatttattagtagtattaatataaaagaataataattagtgtataatattatgttttagaaagttaaagttggttaaaaggaaatttttttataaaattttttatatagaaataatttagtttttgataaatgaaatgttatgttttttttgtttgtatgttgggttaaaataaatatggtttggttttaaaagtttgatggtattttgtaatgttttggttttgagtttttaaaatataattttgtaattattgtttatttaagtaagtatatgtttgttattttaaagtattgtttaatatattgatattgttttgtttatttataatataagattttaaatagagtattttttttttatattttattattttagtatgtaaagtagtgttttttaaatttgtatataaaaaaaattgtagtgaatagtaagtaataataagaaaatggtgtaatgtagtgataggtgtttaaatttatagtttaaatattttttatgtgaatttaattttaattttgagatttttaagaaaattgagttattgaagtgtttaaatttttaagatggtgttgtttttggttttggttggttattttttaagttttattttttttgggggaatggtgttttaatttttttttaagataagtatttttggtaaatgttttttttttaagaaagaagtattttataaagtttttaatttgttgtgtattttttgttttattgggttatagtggatttagtgtgatgttgtatgttttaaattggggttggttttgttttggaatttggaagatttggaaagttaaaaaataaataaaaaaatagtttttagggaggtatgttttaaaaatagtatattttgtgtttatttttgtgtttttaagagtgaggagaggagggaagaagaagggaggtaattgtttttgtgttgtgttttgttgtttattttttttggttgttttggggagtgtagtggtgtgttggggttggggttgagggttggtggttgttgttgttaatggaattgttatttttggatgtgttgggtgtgttttgttttgggtttttattttaggtagttgagatagggtgggtagatttgtggtaggttttttttgagtatggtggtttggtagttgagttgtgggagtttgttgaggttgagtgtagggtagagtgtgggggttgttttggtggtggtggtagaggtggaggtggagggtaggttgttttgtgggagtaggtagttgtttgtgtttggtgttttgtagggtggtggtgtgaatgggttttgttggggtggtgtgttttttgttttgtataggatgtattttagggttgattttgaggaggatgtagatgagattgaggtattggtgggtgtggttgttattgttgtttttttgggtttggatggggttgtttgtggtggtagtgggggtggtggttttaatgggaaatttgggaaggttgtggggttggtattggttataaggtaggaatgtggggagtgtgtggaggtttttgtgttttttttttttttttttatttttagagtgggtggttggaagttgttatagagagggtatgtgttgtttttgggtttggtgttgggtgggtatgtgtagttggggaagttgtttatagtgattggggtggatgaggtatagggtgaattttgtggtggggtaaaggtgttggtagttttggttttgttgttgtaatttttgttttttagtagttgttgagtgtgggttgttaataaggtgtgattgagaggtaggataggtatgtggatgaaatttattattgtggtggttagtggggatgttttggatgattggtgtgttttgttttattagggtgattttgggtgttgagaagtgggaattttttttggggattagggtgatgttttttgttgttgttttggtgggatagttgtggttttttttttagttgttgtgttatttagagtttgaggtttgttttttagaagtggatttgtagattttttggatttagagttatttttttttttaatttttattgtagtggtttgtggagatggttttattggggttttggattagtgagggtttttagaggttgggagtagtagttgttgggttggtgataggttttggggtagtattttatgggtagttgttgttttggagttgtttttaattttgtatttggattggtttatgagtggggataatatttgttgggtggtgggggtagttggtggatttttgggaagtttggggttaaataggtattaagagttggtgattttgtaggtgggagggttgggttggttttgtttgggatttgagggtgttaatagagtgtttaagatattgtttagtagtttgttgtttttttttgggggattagaattgttgtttttagtattttttgtagttttagttttggaatatgtgttttttatgtttgatagtgattgttggttttgtgtttttttgttggaggggttttgtttttggtagggttgagggaagagtagtttgtttagggagataggtatggttgaaattttaggtaaggtgtttgaggtttggttttttgggaatggatttgtggttgggtgatatagtagtggggatttgattttgggggagggtgggttgtttgttatgtggggagtttggggattttttgtttttagtttagttatgatgattggattttttttttttttttttttgtttttagggaggagggaaaagggaaggaggagggggttttgggaatataggggtagagggaggagaaagtgggtgttgaatgtggttggattggagggatttttattttttgggttgggggtgggggagggtggtgttggttagtttttgtttttggtttttattttgttgttaggggaattgtggttgttgtttgttttagtgagtggtaagtggggagtgtaagaaaaagtagtaattgttaggagattttgttttttaatttggggagttttttaagagagttttttaatttttgtttgaggattggagatgtagagtatttataagtttggtatttgagtggttgtggttgtgatggtaatttagtgatatgtggtttttttattttttgattttttttttggtattaaatttgtgtatgttgtgaagtttttagttttttgttgagttttattgtttttttattaaaattttggggttagttggattttttggtatagtttatttttaggaagggttggatttttgttggttttgtattgtgggtgatagttatttttgaagattttagattttagtagtgtgggagtattagttgttttgggttgtagattttatttaaatgataagtgaagttagtttttattgagaatgttatttatatgtataaatataataaggtttattttgattagtgatagttgtggattggttagatagttttttaataatgtttttttttttagggaggttttgtttaaagtttttttttattttaattattggtaggatttgaaattttggagttggtatttttatttgttattttgaatgttatttttaatagtaggttttttgggatggaattttataagtatattatgttttgttttgtaaattaagaattatgttttatttaattggaaaaatgaatagattttattagaagtagaatttttgttattattttaagattttagttttgtaaagatttaatatagaggaagatatttggttatattattttttaaaataataaatgtattaaggatgatattaaaataagaaatttttttttttatgagttttataaaagtgaatgtttttaagttttttttgttgtgattaatatgttttgttttttttgagtatttttagtgtgataaagaaatttgggagtgggagatggtaatatttttgtatttatgatggaagtttggatgttgtgtgttatattttgatttgttttaaggaatgtgttttaatttttagtaaatagtattttaaggaaagttttttttagttttagtttatatagtgtgttatattataatatttttagtagagatgttgaatagtattttttattttaaatatttttagtttgaaaagtaattatttttgagtttataaaatggatttttgttaaatttatgaagttagtagaaaaagggaagaatattgtaatatatattttagatatatagttataaattgtatttgatttaagattattgggtattttaatattattttaaatatattttgtttaaaatagagtgaatgatttgtaaatttttttgtaggattttaaggtttagttgtgttaatgatttatagtttattttaattatgtataaagaatgtagaagattttagaaggtgggggagttattagaggtaaggagtttggattttttgattatttggggaggggttatatgagtgagaaataaatttttattatgttaggttattaggatttggagttggttgttttagtaaatagtttattttgattaattttagatatgtggaagttaggtagatagaggaaaggtaaagagaattttgggaagtaggtatagaatgtttattgggtattaaatggtaggatataatatggtaattgtaaggggattattatgaatagaataggagtaagtgtgggtatagaagtatatgagattagagaagtaaattaatttattaatattattattgttgtttttaggttttttttttttagtttattttaaaatagttattatgttttattgaggtgtaattttagtattatatagtttatttaaagtattagtttattgattttttatgtatttagagttgtgtaattattagtattattaattttgtaatatgagtatgattttaaaattttaatatttattagtagttattttatatttttgtttaaattttttagtagttattaatatgttttttgtatttgtgatttggttattttggattaaggtttatttatgttttatatgaattagtattttatttttttatttttttttattgataaataatattttattgtatggataaattatattttatttatttatttttattagttgttggatatttgggttgtttatattttttggttattatgaaaaattttgttaatgaatatttatgtataagtttttgtgtagtgtatattttttttttttttggatatatgtataggagtggaattgttggtttatatggtaattttaggtgtggtttttggagtaattgttagattatggtttaaatgattgtattttttatatttntattagtagtgaataagggttttagtttttttatatttttgataatattttttatttgttttttttgttatagttttttaagtgtgtgaagtggtattttattgatttatttatatttttttgatggttaatgttatatagtgtatagaatttgtaaaattaggatagtattgttaggtagttttgtaagttttttatttgtgttaattgtaattttttaatagttttataaaataggtattgttattttaattttatagttgggaaaattgaggtataaggttatttagtattataaagttaagtattgtaatttaaatttaagatattaaatgatagtttttttaggagtgtgattttaaatgttagatgttatataatttgattttttggttgttgttgtaaaattggtatttggttttattttaaatttgataaattatatttggtttgattttggttggttataataatttttttgttagaatgtttggggaggttgtttttaaaagattgaaaattttgaagtgggaaaataataataaagatgtttagtatgttttaaattattattattttataaattttgatgttgggtgattagtatttttggtataggaattttttaaatgtatgaatttttgaatgaataaaatttattgattaaatttaggtgtgatggggttaattttaaatatttttgaagattgtttttggagaagaggatttaaatgtggaagtattttttttatagtttggggaaaaaaattattttattaagatatagttgttatataataagttgtatatatttaaattgtataatttgttgttagatttgtgaaattaaaatgataaatatattttttgtttttaaaagtttttttatgttattttttaaatttttttatattgttttgttttattttttttttttagtattaattattattttttggtaagttattaatttgttttttgttattaaatattaggtttttaaaaatatttatatttgatttattaaatattaaattatatatttgtatatgttttttaggtttgtttgttttagatgttttattaatagattttatttttgggaaatgattttggatttatagaaaaattgagtagataatatagagaatgtttatatattatttgtataattttttttgttagtattttaaattaatagggtatatttgttataattaatgaattaatattgataaattgttattaattaatatttatagtttatttagattttttttatttttatttaatgtttttttttttttttaggattttatttaggatattatatttaattgttatgatgttttgtgttttttttggttgtgagagttttttagattttttttgtatttgatgattttgatagtttttaggagtattggtgaggtatattgtaagatgtttttttattgggatttgatgtatttttatgagtagattagggttttgggttttggtggggtggaaattaaagaggtaatgtattgtatttattatattatatgaagggtatatattgttaatatgatttatgattgttaatgttgttttttattatttggttgaagtagtgtttgttaggtttttttattgtatagttatttttttttttttttttgtatattttgtattttttggaaggaaattattatgagttatttaaggaagtgtgggggagtagggagttatgttagtttttttttggagtggagtatttatataatttatttggaattttgtgaggaagatttgtttttttttttttatttatttttttatttagttttttttttgtatggatttatgaatattttgttgtttaaatttttttagtttttggtattgggggtttttttagttgatttttgtgttttttgatttattttttgtattgtgtgtatgtgtgtgtatgtgtggatttttttattttttggtattataagatgttatagatttattagatttattttgtatattttttgttttagttgtagaattagttatttatttaaggaagtttgagattttttatttgaaattggtatagaaatgaagatttgggtgttaaataaattaggttttattttttagaattgtatataatatagtgtattttttttttatttggttttttttatttagtataattattttgagatttagttaaattatagtatgtattaatagttaattttttttattttttttatttatatattatagtttgtttatttatttaattgtggataaatatttgagttgtttttaatttttttggtattataaatagagttattatgaaaatgttgtataagtttttgtatgaatatgtgtttttattttttttgggtaaatatttagtagtgaaatggttggataaattagtaggtgttgtgatatgagtgtttgtgttttttttaaatttgtgtgttaaaatttaattattaatgtgatagttttagtaggaggaggtgttggggagtgattaggttatggagt

SEQ ID NO: 337 - DNA, 7110 bp, Artificial Sequence
  chemically treated genomic DNA (Homo sapiens)
tgttttttgtgatgttttagaggttagaaggatgttttgaaggggaaaattgtaggagttaggtagagtagggttttggtttttttttaatgtttttttatttagataaatttgggttattttgtagaggttgtagtgagttatgattatgttattgtattttagtttgaggaatagagggagattttgttttaaaaaaaaaaaaaaaaaaaaaaaaaaaaaaaaaaaaaattttggtttattttatgaagtatttggtaggtgttttaatattttttggtatatgggaattatttttttttattattggaaggtttaaaaagtaaataatgtgttttatatggttagagttagtattaaggggattaagtagaataattggtagttagtgttagtttggagattaatatagttaaagttgttttgttatgttatgttttttttatttgtattgttttatggtttaagataaaatttttgaatgttatttggatatagtgagtatttggtttgttttattgtttttaggagtaattaatttaatttttatttttttgagaatgatgattttatatagtatatttttttattaagatgtgaaagatgatattatggtatttgaaatagttttaggagagatttgggatatgggaagtttgtagataataatggaaaatttttttttagaatatagttatttgtatgatttatagtagtgttttttggagaatgttttaaaattatttttattgaaagaataataatgtttgttattaggataaatgaaataaggggaaaattttagatttttggaataatgggtttatatttaatttaatgattattatgtttttatattttgtattatttagaaaatagtagttaaatagatagaaatatagaagattgtttaaaaattaaagttattgagttagatttttttttgaaaggttagtgtatgggagatgagaaaggtattatagagattagagtgtttatataaaagatattttagtagatgatttataaagagtatattaagtatttatattatttatattaagttgttggttattttgtttattaaagaaaataagaaagaaatttttttttgatattattttggtgtagtaataatagagttttggaattagttgttagaagtgataattaaagttagtttattatgtttattaattaatttatatagttattttgaagttttatataattgtttttttgttataagtttttatttttttttatggtattttggttttgaatttagataggtaaagaattaagtatggttgggtgtggtggtttatgtttgtaattttagtattttgggaggttgtggtgggtagattatgaggttaggagattgagattattttgattaatatggtgaaattttgtttttattaaattataaaaaattagtttggtatgatggtgtgtgtttgtagttttagttatttgggaggttgaggtaggggaattgtttgaatttgggaggtagaggttgtagtgaattgagattatgttattgtattttagtttgtgagattttgttttaaaaaaaaaaaaaaaaaaagaaaaaaaaaaaaagaattgaagtgtttggagattagtgtattgtaatatttatatagttaagtaggtatttttaattgaattttaaaaaagtattatttttgaaattttttttagtttagatagggttagttatttgggtagaaaggaaaagaaaaataaaaaattggaaaaggatgtattagtattttttttagaaataatttaatattaggaatagaaggaggattttatttattaatttttaataattatttgatgttgttgttgggttggttaaatatttgttaatattgatgatttttttatttattattagagagaagtagagggatttgatgtttagagaagtagtaaaatttattttttattttttttttttagttggatggaagtatttggaggttggttttatattttagtattttagtgttggtgatgtagattatttttgttttagagtaattttgtgttatggaatttaagaggattttgttgtattaggataggaatgtatttttgttttatttgtttttatgaaagtagattttagagatttttagatgttatgagattaattgttatttagggtaggttttaggggagggatagagaagggtagtgttaataatagggattttggagataagattagtaatttaagaaataaatgtgagatattttatttttttttaatttattttttttttaaaagtttatttttattttttttttttttattatgtagtaattgataattaaatatagttttggtttttattatgtaatttagtagaatatttagatattaggaattttttatttttggttatttatataataatgaaatttgtagtttatgttaggttgtgtggatagtatttgtatttttggaaattaattggaggttttttttttatttttttttggttgttttttatttttttttttattgtggtttttgttttttttaagttgattagaattatgtataaaattagtttttaataaatattaatattgaagttttagtaggttgttaatttttgtatagttattttaaatgttgtatataagtgtaaagttttatggagttttagaggtttttaagaatattgtaaatattttaggtttaattagtagttttggagttaggtaatggtttgtggttttttgtgttaggttttttgaggtttttagtttttagaggttgtttgtaattatgatgtgtatatatatagtatttttttttaaatatagtataaattttttttagattttgttaggtatttataattattgaatatatatgtagattgatttttatttttttaaagtttgaaaaataatttagtgttttaatttaggttttgttagatattttttgatttaaattgttgtttgtagttttattttttaagggaaatgaaaaaataataaatttttagattggtgttgatgtttattttttttaagtgggttgattatttgttttgtagatttttgatgggtggggtgtggggtaggagtgtgatttaatttttagtatttttgaattagtttttttatggtgataggttagtttaattggggttgtaaatagatttgataggtttgttttgggttgatggttattgattaggtttttagattagataagttatttggttgagtttatagtaggtggggtgtgtttattagtttaggggtagtgattggatgtttgttgtaatattggagaatgtatgttttgggttgtagtaggagatatttttaagtatagaattaaaagggtttattttaagtggtagggtattagtgatggagaggtttgagagttttagtgtttagtttttttttttatgtttgggaaggtgtagaataggttgatgtagagtaaggagtgagttttaggttttagttttttggtttgtttttagggtagtaggtgaggagtggtattagtttggggattttttttttgtgttttgtaagaattggtggtagttagtaggtggggaggtgggggtatgtgtttggatgtgggtgtttgtgtaattagttttttaagtgttagttttgatagtgtttttttgggaggttggtttgagtttttgtttttgttgtggtgtaggaagggttggggttttgttgtttgtattaggtaagagtattttgagtaaaggaagaagatgatttgtttttggagttattattggggagtgggaatttggaaagttttttaattagggatatatgtgattttttttggaaagtagttttgattgtggtttgtgtatttttttatttttttttgaatttttttaggtttttttgttttgtttatttgttgggttgtagttttttattgttttgtattttttatttaatttggtaattttaaatgtgtatggtttggttggggtgtgtggagtttggttttgggtgatttattttgttgggtttttatggtggttaagggggggtggggttaggtggtttttgagaattgagtttgattttgatgttgtgaattgatttggagtttgaggggaaagatgtttgatttttttgggggtattggagtgggtgtaggagaggtttgtggggtgtgttttatttatagggatttttttttagtttatttagataggtgttttttgggtttttgaaatttaatggttatgtgtttatgtttagtatgtttggttgagagtttttatttttagggtaaatgagttgagttattggggaagtgagaggtggggtgttgtaagggagttggatgaggtgatatatgttggtgatataatagtaggttgttttttgtgttaagattgatattatgaggatatagatttgggggaagggggaatttttaggtaaaggttgttatagttaaatttttgtgaatgattgtgatttgatagtggtgtaaaaggaaagagtgaatgtagtttatgttgtggaaatttaggggtagaggtaaggggggagggtattttttttgtagggattgtttttgtatttttttttatattgagtagtgtggttatttggttttttttatttgtgtataggtaattttagatttgagttagtgatattgtttaatgtatttattttagtttttattattagttttttatttttgttttataatagtttattttgtttttggttgggtttttgggtagaggttgaggtttagtttgttatttttgttttgtgttgttgtaaaagttgtagtaagtgtagttgtaggttggtggttgggaattggtttgagtaagttttaggtagttatattgggtatgtttagtagagtttgtggtttggggattttgtgtttgtatttagagttattgttttgtttttttttattgttttttgttttgttttgttttttttttgtttggtgtggttttgtttgttttttgtttgttttttgtttttttttggttttttgaggtgtttgggtttttggtgtggtggtggagggggtgggtaggttggtgggtggtgatgtggtgggattttttatgtgttgtggtaggatatgtgtttggtgttgggatgtgattgtgtttagttttttttttttggaagttgtagttatgatggaagtttgagagttgagttgttgtgaggtgaggttgggtttaggtgagggagatgagagatggtggtggttgtggtttggagttttttttagtgtttgtgagtagttgtgggggtagtgtttttggggagttggttggtttgtggtggtggtagtggtggtgttttttgttttttttttgttttttttaattgtgtagttttttttttggttttttttgaaagggaaggtggaagttgtgggtttgggtgggagttggttgaggtgtggtggtggtggtggtattttttgtttttggagtgggggggagaagtggtggtggtggtggttgtggtggttgtagttttagggagggggtttgagttgtttgttattatttttagggttgggaatgttggagagttggtttttttttttttattgtttttaatatggtggtggtggtggtggtatatttagggatttgggttggttttaaattttttgtttgttgttgttgtattttttgtggtttgggttttggaggttgttggtggaggtagttgtttggaggattatttgttttttttttattttgttgttgttgttgttaggtttttggttgttgaggagaagtaggtttagttgttgtaattatttagtagttgttgtagtagttattatttggttgtggtttagagttaagtggtggtagagtgaggggtattagttattgttaagtttagagttatttttattttgtagaagaagttttgttattagtagtttttgttatttttttttttttttttttttagttataggtttttagatatgatagttattattaaagagattgttagtagaaataaaaggagatattaagaggatggatttgatttagatttgatttgtatttatttttgtggttgtttttttttatttttttgttatttttttagaatgtgggagtagatggatgtgaaaatgtttgtagtttgggtgattataatatttaattttggttaggttgttaggttatatattttgtgttttttttttgtgtatttaatttagggtgtgtttggttagatggaatttttgtttggttgtaagtgttaagttattgattgtttttttaggttatttatatggtttttttttgagggttattgtttgttaatatagaatatagtatattgttagtggattagtgagtttggtaatttggttttttaaatgaataaaaaagtagatgttttttgaggttgagtatattttgattaaattttggtttaggttttagattaagggtttagattagaataaaatgaaaattagtgttgtatgtatgtatattgtattagaattttgtagtgattgttttagttttttgagttgtattgatagatttttttaaaatatgattgatttgtataattttagaagtagaattatttttagtatatatggtgtatattgagggtaaaaagtagttttgttaatgtttaaatttaagttatttataattttgaattgtatgtagaagttttgtagtttgaagttaatagtgttataatatattttataaggtgtttttattagatttttgttatatttatttttttttttttttatggggtgatgtaggatagtgtttgaaatttgtattttagtagtatttaatgtttagtgtttttgttataaatatagaatggatattgagtagtttttgattttagatggtaatgtgtaggtttaagggtattgtgtgtagtaagtgaagattgtagaaataaaattttagtttatgtttgaaatttaagtattgttgtgatgttagaattgttgtttattgtttttaggttttaggttttttgatattttttggtattgttaattttattgatttg

SEQ ID NO: 338 - DNA, 7110 bp, Artificial Sequence
  chemically treated genomic DNA (Homo sapiens)
taaattagtaaaattaatgatattaaaaggtgttagaggatttgaaatttaaaaatggtgagtagtaattttggtattataataatatttaaattttaagtatgaattgaagttttatttttgtaatttttatttgttatatataatatttttgaatttatatattattatttgggattagaaattatttaatatttattttatgtttatgataagagtattgaatattaaatgttattgaagtgtaaattttaagtattattttatattattttatagggagagaaaaaggtaaatataataaagatttagtaagaatgttttataaggtatattatggtattattgattttaaattataaaatttttatatatagtttaaagttgtaggtaatttaagtttaaatattaataaaattattttttgtttttaatgtgtattatatatattgaaaatgattttgtttttaaagttatgtaaattagttatattttaaaagaatttattaatgtaatttaggaaattaaaataattattgtaagattttgatgtaatatgtgtatgtgtaatattaatttttattttattttgatttaaatttttgatttagggtttaagttaagatttaattgaaatatgtttaattttaaaaagtgtttatttttttgtttatttaggagattggattattgagtttgttaatttattaatagtgtattgtattttgtattaatggataatagtttttaggaagagattatatagatagtttaagaaagtaattggtggtttgatatttgtaattaggtaagagttttgtttagttaaatatattttaggttgaatatatagaaaggaaatataaaatatatgatttagtaatttgattagggttaaatgttatagttatttaaattatggatatttttgtatttgtttatttttatgttttaagagagtgatagaaaggtaaagaggagtagttgtagaaatggatataggttaagtttaagttgaatttatttttttgatatttttttttgtttttgttaatgatttttttgatgatggttgttatgtttgggagtttgtggttgaagaaaaaggaggagagagatggtagaagttgttggtggtggggttttttttgtaggatggaaatggttttggatttggtggtagttgatgttttttgttttgttgttgtttggttttggattgtagttgggtaatggttgttgtggtggttgttggatggttgtagtgattgggtttgtttttttttagtagttagaggtttggtagtggtggtagtggaatggggagaagatgaataattttttgaatggttgtttttgttggtggtttttggagtttgggttatggggggtgtggtggtggtggatgggaggtttaaaattggtttgggtttttggatgtgttgttgttgttgttgttgtgttggaggtagtagaaggggagagattaattttttggtgtttttagttttggaaatggtgataggtgatttagattttttttttggagttgtagttgttgtggttgttgttgttgttgttttttttttttgttttaggagtgggaggtgttgttgttgttgttgtgttttagttggtttttgtttgagtttatggtttttatttttttttttaggagaagttgaggaagaggttgtatggttagaaaagatgaagaggaggtgagaaatgttgttgttgttgttgttgtaggttggttggttttttgagggtgttgtttttgtggttgtttataggtgttgagaggggttttgggttgtggttgttgttgttttttattttttttgtttgagtttggttttgttttatagtggtttaatttttaaatttttattatggttgtagtttttgagaggagagaattgagtgtagttgtgttttagtgttgagtgtgtattttgttgtagtgtataaagagttttgttatattattgtttgttggtttgtttgttttttttgttgttgtgttgggagtttgggtgttttggaagattgaggggaggtgggaggtgagtgagaggtggatgggattgtgttgggtgaggggagggtagggtagggtagggggtggtaggagggggtagagtggtagttttgggtgtgagtgtagagtttttaagttgtaggttttattgagtatgtttagtgtagttgtttggggtttgtttgggttggtttttagttgttagtttgtagttgtatttgttgtggtttttgtagtaatgtgaggtgaggataatgagttaagttttggtttttgtttagaaatttagttggaggtagggtaggttgttgtggggtgggggtggaggattgatgatgaaagttgagatgggtgtgttgagtagtgttattgatttgagtttgaggttatttgtgtataggtgaaaaggattaggtgattatgttgtttagtgtagagggaaatgtagggatggtttttgtaaggggaatattttttttttttgtttttatttttagatttttgtggtgtggattgtatttgttttttttttttgtattgttgttggattataattgtttgtagagatttgattgtaatagtttttgtttagagattttttttttttttaaatttgtgtttttatggtgttagttttagtataaagagtaatttgttattgtgttgttagtgtgtattattttatttggtttttttgtagtgttttattttttgtttttttggtaatttggtttgtttgttttaaaaatgaaagtttttagttgagtgtgttgaatgtgaatatatagttgttgaattttaagggtttaaagggtatttatttaaatgaattgaaagaggatttttgtgagtgggatgtattttgtaggttttttttgtgtttgttttggtgtttttaagagagttgagtatttttttttttgggttttaggttggtttgtggtgttggagttaagtttggtttttagagattatttagttttgtttttttttggttgttgtgaaaatttggtaggatggattgtttggggttaggttttgtgtgttttggttggattgtgtatgtttggggttattgggttgagtggaaagtatggaatggtaggaagttgtagtttagtgagtgggtggggtgaggagatttaggagggtttaaaaggaggtggaaggatatatgggttatagttggaattattttttgaaggaggttatgtgtgtttttagttggggaattttttaaatttttattttttagtgatagttttggaggtaagttgttttttttttttgtttggggtgtttttgtttggtgtaggtagtggaattttaattttttttgtgttgtggtggaaataggggtttggattagttttttgaaggagtgttgttggggttggtgtttggggaattggttatataagtatttatatttaaatatgtgtttttgtttttttgtttgttggttgttgttgatttttatagaatgtggggagagagtttttaaattggtgttattttttgtttgttattttaagagtaagttaaaggattgagatttgagatttattttttgttttatattgatttattttgtgtttttttaaatgtgggaaaaggagttgggtgttagggtttttgggtttttttattgttgatgttttgttgtttagggtgaatttttttggttttgtgtttgagggtattttttgttgtagtttagagtgtgtattttttgatgttgtaataaatgtttagttattatttttgagttggtgagtgtgttttatttattgtggatttagttaagtgatttatttggtttgagaatttagttaatggttgttagtttagaataaatttgttaagtttgtttatagttttgattgggttgatttgttattgtgagagagttgatttggaaatgttgagagttggattgtatttttattttgtattttatttgttaaggatttataaagtaagtagttgatttgtttaaagagaatgagtattaatattagtttgggaatttattgtttttttattttttttaggaagtagaattatagatgataatttgagttaaaaaatatttaatgagatttaggttgaagtattgagttgttttttaaattttgagagaatgagaattaatttgtatgtgtgtttaataattgtaagtgtttagtaaagtttaaagagggtttatgttgtatttgagaaagagtattgtatatgtgtatattatagttgtaggtaatttttgaagattagaaattttaagagatttagtgtagaaagttataggttattatttaattttgggattattaattaaatttgggatatttatagtgtttttagagatttttgaggttttataaaattttgtatttatatatagtatttaagatagttgtgtaggagttaataatttgttgaagttttagtgttgatatttattgaagattggttttgtgtatagttttggttagtttgggaaaggtaaggattatagtggaaaaggaaatggaaagtaattggaaaagagtaagagaaaggtttttagttgatttttagagatgtagatattgtttatatagtttagtgtgaattatagattttattattgtataaataattaaagataaggagtttttgatgtttaggtgttttattagattgtatggtaaaaattagagttgtgtttaattattaattattgtgtggtagaaaaagggaaaatgaagatgaatttttaaaaggggagtagattagggaggggtaaaatgttttatatttgttttttagattgttgattttgtttttagagtttttgttattagtattgtttttttttgttttttttttggagtttattttaagtgataattagttttatagtatttgagaatttttgaaatttgtttttatggaagtaaatgaaataagggtgtatttttgttttggtgtgatagaatttttttggattttatggtatagagttattttggagtagagataatttgtattattagtattaaagtgttagaatatgagattagtttttaagtatttttatttggttgaagaaagaaaatgggaaatgggttttattgtttttttaaatattaggtttttttatttttttttagtggtgaatgaaaggattattaatgttggtagatatttggttagtttaatagtaatattaggtggttattaggagttggtgaataaaattttttttttgtttttagtgttaagttgtttttgaaagaaatattgatgtatttttttttaattttttgtttttttttttttttttatttaaatggttggttttatttaaattaaagaaagttttaaaaatagtatttttttaaagtttagttgaaaatatttgtttggttgtatagatattataatatattggtttttaagtattttagttttttttttttttttttttttttttttttttttttgagatggagttttataggttggagtgtagtggtatgattttggtttattgtaatttttgttttttaggtttaagtaatttttttgttttagttttttgagtagttgggattataggtgtatattattatgttgggttaattttttgtagtttagtaaagatagggttttattatgttggttaggatggttttgattttttgattttgtgatttgtttgttatggttttttaaagtgttgggattataggtgtgagttattgtgtttggttatatttagttttttatttgtttggatttagaattagaatattatagggagaagtagaagtttgtaataaagggataattatataaagttttagggtgattatgtagattgattagtaagtatggtaaattagttttaattattgtttttaatagttgattttaaaattttattgttattatattaaaataatgttgaaagaaaattttttttttattttttttgataagtgaaatgattagtaatttgatgtggatgatataaatatttgatgtgttttttgtaggttatttgttaagatgttttttgtgtaaatattttgatttttatagtgttttttttattttttatatgttgattttttaaaaagggatttaatttaatagttttaatttttaaataattttttgtatttttgtttgtttaattattgttttttaaataatatagaatataaaaatataataattattggattgaatgtaaatttattgttttaagggtttgaggttttttttttattttatttattttaataataaatattattgtttttttaataaagataattttaagatattttttaaaaggtgttattgtgggttatataagtaattatattttaaaagagaattttttattattgtttataagttttttatgttttaaattttttttgaagttattttagatgttatggtgttattttttatattttggtagagagatgtgttgtatgaaattattatttttagagaaataagggttgagttggttgtttttgagaataatagagtagattaggtatttattgtgtttaagtggtgtttagaaattttgttttggattgtggagtaatataaataaaaaagatataatatgataagatagttttgattatgttagtttttaggttaatattagttattaattattttatttggtttttttaatattaattttagttatatggagtatattgtttgttttttagattttttaataatagaaaaaggtaatttttatatattagaaaatattgggatatttattaggtgttttatagagtaggttgaaattttttttttttttttttttttttttttttttttttttgagatggagtttttttttgttttttaggttggagtgtagtgatgtgattatggtttattgtaatttttgtagaatagtttgaatttgtttaggtagagggatattgagaaggagttaaaattttgttttgtttaatttttataatttttttttttaaaatatttttttggtttttaaggtattataaaaaata

SEQ ID NO: 339 - DNA, 6478 bp, Artificial Sequence
  chemically treated genomic DNA (Homo sapiens)
tttattttgaagggatgtttaagaaatattgttaaatttaaaagtgttgtagagtaatatgtattataagattatattggtataatagtaataaatagtatttttttatataattttaaaaaaatatatagatttatgttaagtattagttaagatgtttggtatatggtaggtatttaatatttaatgaatatatgtagaggatttttattttttattttatattttttggataagattttgaatttttatgagtatgtattatttaaatttagatttatagggagtgatggaaaatgtgaaaataaaattttaaaaaggaaaagaaagagtaaagatttagatttaaaaaaggaaatgtaaataagatgaaatagttaaagataggtttttttaaaattaatgttgagataatgttattagtagtgatagttagttaagagatggtttgtagtttattgtttagtattgaggtatttagtaggggttgtatttaatttttaagttggaattaattgaaattgttgggtttgaagagttgtttttatgagttattgatggtagaaagtatagaagtattaaagaaaataatttagaaatgtggaaagagaaaagtatgtttttgttttgggagaataatatttgtgtgtaattaagtaggaagattttgtggaggaaagtttgaaaaagtagagagttgaagagaaaagagttaaatgaaggatatggtggttaatatttaaagtaaaaagatatttttgaagaagatgtgtttttagggtttttaagaagttgttatatttatgtttagagttattttgtaagtttatttggaaagtgtattggtgttttttggtataagatttatgaatattaatagttttgttatgtgagtaggtgtttatattgaagggttataagtaaagtttttatgtgttattattgttagaattttttttgtttttttttaatataaaagtagttttgtttgttagtatggaagttttgggaagagttttatatttgttttgtgttgttaatatttttgttttggtttttttgttggaatatataagttatttagtattagttatttatttttttggtagaattgtggtaagaggggattaatagggaaaaaaaattaaaaaataaataaaaagttaaaataatatgaaagagttgggtatgtttttaaaataattagtgtttattttttttagttttgtgtttgtgtttgtttgtattttgtatgtttgtttttgtggtggggggggatatgtttgtgtttttgaaaatttttttatttagatattataaggtattagtttaattttgaatatagttggttgtagtatggtgtatagatatgattgttttttttttagaaaattttttagtttaaatatgtttgtagagtatgatttatggtgtttttttttggattgtttagtgggtaattgttgtatgaaaattagagaaatagatgtagattttgaattttggttataaatttttgttttatgattatgggttttaaatgtgttgtgttatattgataaatatatagttattttgaaataaaatggattttatttttaaagttttgttttttgttttttattttttgtttgtttgttggttggaaatatatttattagattattgattaaatataaagaaaatagagatgatatatattagaatgttattttatgttataataagaagatatttgggaaagttttttttaattttgtggttaatgtttaaaatgggtgttagtagtttatattttattatggataaattggtttattttttattttttattttatttattaatttttatagtgtatggatttgtatttaaagaattatggtttatttatgtattttttttttattttatttaaaatgaagaatttggagatagaattaagtttttaagaagtgtaagtatttattgatgaagaaataattagtatgtggttaaattatgggtttgttttataaattaatatttggattaagtaatagttttaattattgttattagtataattaatttatgatgaggaatgattaattgattagtgaatattgttatattataagaaatttatattattttttttatggggatttaaatattgattatttattttaaggtttaagtttattttttagttgagaattttaaggtaattatatattttatatttttttgtataaagaaagaaaatattgagttgtttaatttttattatatatagagagagatatattaatgttgttatttttgtgtaatgatatagtatagaggtaagaaatttggaagtagtggttttgtttaatgaggttgattttatagtttaagaaatgagaatgaatagaattttgaggatatttatttttatttttatttttttgggattagtgtatttttattttttggagagatgttaagtaagaatgtgtagtagttttttttggataatagatttttgtatatatatatttgttagtgatgttatgttttttatttttaatttaagttttttttgttttatttttaatatagttgttttttttttttttgtttaataattttttatttatttttattgtttggtaaaaatgaatttagtttttaaggaattttaaggattttaaataagtatttggagttataagttttatggattaagtagaaattggtatataatgtagtgttttgtgtatttttataattattttaatgatagtgtgttaaatgttttgtaaatttttttgtgtttttttgtttaaaatgtgtgttttttttgtagttaaagggttttttataataagtttttgttataaaatgatggttatataaaagagagaagagaggtgtaaaaataataaatatagatttagtaaaaattttatttttttattgttttgaattttttaatagtaagaattgagtttgttgggttgaaaattgttttaatgtatttttataaaaggatttttgatttggtaagtgtgtgtgatgtatattttttatgttatattataagtgttatttagtaattttattagatagggtagtgttttagtatggggtggggtgttttttgataggtttttaaaaggtttggatgttaatgtatattttaatattatttataaaaaggagattggagtagtgtttttttttgtattgggtaaggagattttttttttttgtttaattatttgtttgttttgttttgtgggagaattataagtaaatgttatagaggtagtggagaaaaaagggtgttttaatttttttttagagttttttttatttgatgtatgttgtattttttaaataagttgtgtaaaatggttgtagggtagattggtttttttttttaaagttttttatttggttgggtttatttgtaaatattgtatttattttttttagtgttttaggattggttggaaagatttttttttttgtaggttgggttagtgtgagagatttaaaaaattatttttttttaaaattattgtattttaataaaaggattgggtaggggttggaatgagagaaaattggttttttaaaatgtaaaattgttatatttaaattagtttataaaatatgtgtttaattatgtggtgggatgtgtgtaggtgtatgatgagagaggtaattaatatggttatttggggtgtaaggatgtgggaataggtaagtaatttttatattggatttttattttagggagttgggttttagttatagttttgagttgtgtgattttgggtaggttttatttttttggggttttgttttattagttgaatagtatgaggatgagttatagttaatatttgttttatgatatttatttagtattatataagtgttatttttgtttttttagttaatattgatgtgggtagtattatatgtttattttatagatgaggaaattgaagtttgaagaagttaaatatttattttagaatatatagttggtaagtggtagatttggaattggaatttagtttagtttgattttttaatttatgtttttgattattatattgtttttttaagtttagatttgaaattttattttttgtgtggttgtgtgtttgggataggggtaattaatttttgattattttatatgttgtatagaatttggagaggattttttaaagtaaatgaattttgaaagttggattgtagagtaaatgagtgtagttaatttagttaggggtttgtaagagggagaaagagaaaaagattgtggaatggaaagttttttaatttaagttttttttaaggggtagttattttttgttttatagtttagggtttgtatgtgttttttttggagtggaaaaatatataagttataaggaatttaatagatagaaaggtgtatagaggaatttaaagtgtgggttggggggtgaggtggtgggtgggaggtgagtgggtgtaggtggaatattgttttttaagttaagttgttgtaaataaaaaggtgtaaagggagagaagttggtgtttaatgtgagttaggagtagtgttttggttttttttttgtttattttaaaagtattttttgtattgtttttaaggtgagaaataggaaagaaaatgttggtttgtgtgtttgttgtttgtttttttggttgtttgtttttgtagggttgttgggagtttttaagttttgtgagaattttgggagttggtgatgttagattagttgggttatttgaaggttagtagtttgggtagggtttattgaaagtttatttgtatatattaggtaatttaattttttattttgtgtgatagaagtagtaggaagtgagttgtttagaggtaggagggtttattttttgttaaaggggggattagaatttttttatgtgagttgtttgaggattgggatgttgagaatgtgagtgatttgagtagggtttgtttgggtattgttggggtaggatttggaatgtatttggaaggttttttgtaagtatttatttggaaggagaatttgggatttttttgggaattttttgttttggttggattggttgagtaagtttggaaaatggtaaatgattatttggattaattataggtttttagttggtttgtttgttataatttatgatttggggttgggaaaaagattaatagtttatgtgttaaaaaaggggtagagtttgatggagttgggtggatttttttatgttatttgtttttatatttagaggataagtatttttgtagatatttagtgtaagggagattatgtttgattgtatggatgttttgttagtgagttttgggtaaattttggatttttatattgtgagtttgtttttttgtatgttttaggagaaagtttttaaagtatgttttagtggattgatttaaattgaatggtagtattggtatattgtttaatgtaggtttatttttttttttttttttattaagaaaaaaaaaattgttttttttgtatgtaataaagatgttggaaataaattgtattggtagtaagataaaggatttaatgatttaatgttgaaggggtgtgatatgttggtatgtatattgattttttttgttgaaaattttttgttagatgttttttttttaaataattttttttgtttttatgtttttttttttattaattttatagttttttgaaaatagtttttaaaatatgtataaaaatgtggggggtggggagtagagggtgattataagattttaaaatattttttaagtagggtaatttgatatattttgtagtttttattaaaatgtatgtagagtggaatttaattttgttgttttttggattagttattagttgtataggtttttttattttttgtgtattttaatagtttaaagtaattaaaatatgatattttttttgaaaggaatttagtttaattaaggtggttgttgtttttgaagtttataaattattagtttaagttgttgtttttaatgttttttttgttaaggaaaggtaatattttttagtattgattttgttgttatttttttaagttattttgttggtttaagaagttgttgttttgttagaaaattattggtaatgaatattttttggattgagttatttattatttttatattttgtagtttagtttggaatgtggatattagttaaaggaaaggaaatataagtggggtagtttaatttaaaaaaaaaatattgattattttgttatttgatgttgatatagtgttgaggtatgtatttggttaatagtagtttggttgtaggtttgagaaatgattaggagttttagaaaattttatttttgggtggttgtagtgggagtttgtaggatgttttgttgttttgatagtgatttagataaatggtttagttatttattaaaatgtttttagtattttatttg

SEQ ID NO: 340 - DNA, 6478 bp, Artificial Sequence
  chemically treated genomic DNA (Homo sapiens)
taaataaagtattaaaaatattttgatagatagttgagttatttatttaaattattgttagggtggtgaagtattttgtaggtttttattatagttatttgaaggtgggattttttgggatttttgattattttttaagtttgtagttaggttattgttgattaggtgtgtattttggtattgtgttagtattagataataaaatagttaatattttttttttaaattgggttattttatttatatttttttttttttaattgatgtttatgttttgggttgaattgtaagatatggaaataatggatggtttagtttaaggggtgtttattgttagtagttttttagtaaaatagtaattttttagattaataaagtgatttggaaaggtggtagtagggttaatgttaagaaatattgtttttttttagtaaggaaaatattggaagtggtagtttgaattggtggtttatgaattttgggagtagtagttattttaattaaattaaattttttttaaggaaaatgttatattttaattattttggattgttggaatatataaggggtggggggatttatataattagtagttaatttaaagaatagtaaagttaaattttattttgtatatattttagtaaaaattgtaaaatgtgttaaattgttttatttgaagaatgttttaaagttttgtggttattttttattttttattttttatatttttatgtatattttaaaaattgtttttaagagattataaggttggtaaggagaggagtatgggggtgggaggggttatttgggaagaaaatatttaataggaaatttttagtaaagggaattaatatgtatgttagtatattatatttttttagtattaaattattaaattttttgttttgttattaatgtagtttatttttaatgtttttattgtatgtaagagagataatttttttttttttggtagaagaagggaaaaaaataaatttatattgagtagtgtgttgatgttgttatttggtttgggttaatttattgaagtatgttttgagagtttttttttggagtatgtaggaagatggatttgtagtgtagaaatttaggatttgtttaggatttattgatagaatatttatatagttaaatatgattttttttgtattgaatgtttgtaaaagtgtttattttttaggtgtggaggtaaatggtatagaaaagtttatttaattttattaaattttgttttttttttggtatgtaggttgttggttttttttttagttttgaattatgaattatgatagataagttagttaaaagtttgtaattgatttaaatgattatttattattttttaggtttgtttggttaatttagttggggtggggggtttttagaaagattttaagttttttttttaagtaaatgtttgtaaaaagttttttgaatgtgttttggattttattttgatggtgtttagataaattttgtttggattgtttgtgtttttggtattttagtttttaaatagtttgtatgggggaattttggttttttttttggtaaagaatagatttttttgtttttgaatagtttattttttattatttttgttatatagaatgaaagattgaattgtttaatatatgtgagtgaatttttggtgaattttatttgggttgttaatttttaaatgatttaattagtttgatattattaatttttaggatttttatagagtttaaaaatttttagtagttttgtaaaagtagatagttagagaggtaggtagtgagtgtataagttggtgtttttttttttattttttattttaaaaataatataagaagtgtttttaaaatgagtaggggaggagttgggatgttgtttttggtttatgttgagtattaatttttttttttttatgtttttttatttgtggtggtttagtttggaaaatggtgttttgtttgtgtttgtttgttttttgtttattgttttgttttttagtttatattttaaatttttttgtgtgtttttttgtttgttaaattttttataatttatgtatttttttattttagaaaaagtatatgtaagttttaaattgtagaatagagaatggttattttttgggaaaggtttgggttgggaaattttttattttatagttttttttttttttttttttttgtaagtttttggttgaattgattgtatttgtttgttttgtaatttagtttttgagatttatttattttgaaaaattttttttaggttttatgtagtatatagagtagttaggaattggttatttttgttttaaatatatagttatatagaaaatgagattttagatttggatttgaaaaaatagtatagtggttaagagtatgggttggggaattaaattgaattagattttaattttaggtttgttatttattagttgtgtgttttgggataagtatttaatttttttaggttttagtttttttatttgtaaaatgggtatataatattatttatgttagtgttaattgggaggatagaaataatatttgtatggtgttgggtaaatattatggaataaatgttagttgtgatttatttttatattgtttaattggtgaaataaaattttggggagatgagatttatttaaggttatatagtttagagttgtgattagaatttagttttttaggatgaaagtttaatgtgaaaattatttgtttgtttttatatttttgtattttaaatagttatgttggttgttttttttattatatatttatatatattttattatataattaaatgtatattttgtaaattggtttaagtatgatagttttatattttgaaggattagtttttttttattttagtttttgtttaatttttttattaaaatatagtaattttaagggaaaatgattttttagattttttatattgatttaatttataggaagaagagtttttttagttagttttaaaatattaagaaggatagatgtagtatttataaataaatttagttggatggagagttttaaaagggagagttaatttattttgtagttattttgtataatttgtttaaaggatgtaatatatattaaataaaggaaattttggagaggaattaaaatatttttttttttttattgtttttgtagtatttatttgtaatttttttataaaatagggtaggtaagtggttaggtagggagggagagtttttttgtttaatgtagggaagagtattgttttagttttttttttgtggatagtgttggaatgtgtattggtatttgggttttttaaaagtttgttagggggtattttattttatgttgaaatattgttttgtttagtggagttgttaagtggtatttgtggtgtaatatgaaaagtatgtattgtatatatttattaagttaaagatttttttatgaaggtatattaaaataatttttagtttagtaagtttagtttttgttattgaaaagtttagggtaataaaggggtgagatttttgttgaatttgtgtttgttatttttgtgtttttttttttttttttatatggttattattttgtaatagagatttattgtaagaaattttttaattataaagaaaatatatattttaagtaagagaatatagaggaatttataaaatatttaatatattgttattaaggtagttgtaaagatatataaagtattatattatgtgttaatttttatttggtttatgaggtttatggttttaaatgtttatttaaggtttttagagttttttggaaattgagtttatttttattggatagtggaggtggatgaaaagttgttagataagagaagaggaaatagttatattggaagtagagtaggagaaatttaagttagagatgagaaatatggtattattgataggtatgtgtgtatagggatttgttatttaggggaggttgttgtatatttttgtttaatatttttttaaagagtagagatgtattggttttagggaagtgaagatggggatgggtgtttttaaaattttgtttatttttattttttaagttatggaattagttttattgagtgagattattgtttttgaattttttatttttatattgtattattgtataaaaataataatattagtgtgtttttttttgtgtgtggtaaaggttgggtgatttgatgttttttttttttgtgtaagaaaatgtaaaatatataattattttgaagtttttaattgagaaatgaatttgggttttgaaatgaataattagtatttaaatttttatgaaaggaatagtatgggttttttataatatgataatatttgttagttaattaattattttttattatgaattaattatgttgatagtaataattagagttattatttaatttaagtattaatttataaaatagatttatgatttagttatatgttaattatttttttattagtaaatgtttatattttttgaaaatttgattttgtttttaaattttttattttaagtaaaatgaaggaaagatatataaataagttataattttttaaatatagatttgtgtattataaagattaatgagtagggtagaaagtgaaaaatagattgatttgtttgtaatgaaatgtaaattattgatatttattttaaatattagttatagggttggaagaaatttttttaaatatttttttgttatggtataaaataatattttgatatgtgttatttttattttttttgtgtttgattaatgatttaataaatgtatttttaattaataagtaaataaaaagtgaaaaataaaaagtaaaattttgagagtaaaatttattttgttttagagtaattgtatatttgttagtgtgatatagtatatttgaaatttataattataaaataaaaatttatagttagggtttagggtttatatttgtttttttggtttttgtatagtaattatttattggataatttagaaagaaatattatgaattatgttttgtaaatatgtttgaattggagagttttttgaagaaagagtagttgtgtttgtgtattgtattgtagttggttgtgtttaaaattgggttaatattttgtgatgtttaaataagaagatttttagaggtgtagatatatttttttttattataggggtagatatgtaaagtgtaggtagatataggtatagggttgggggaggtggatattgattgttttaaagatatgtttagtttttttatgttgttttggttttttgtttgttttttaattttttttttttgttaatttttttttgttatagttttgttagaagaataaatggttagtattgagtgatttgtgtgttttagtagggaagttaaggtagagatgttggtagtatgaggtaagtatgaggttttttttagggtttttatattagtaggtagagttgtttttgtgttggaagggagtgggggaagttttaatagtaataatatatggaaattttgtttgtggttttttagtatgaatatttgtttatataataggattgttgatgtttgtggattttatattaaaagatattaatgtattttttaaatgaatttgtaaggtggttttgggtatgagtatagtgattttttagaaattttagaaatatattttttttaaaaatgtttttttattttgagtgttggttattgtgttttttatttggtttttttttttttagttttttgtttttttagatttttttttataaagtttttttatttggttatatataaatattgtttttttaagataagggtatatttttttttttttatatttttgaattattttttttagtgtttttgtgttttttgttgttgatgatttataaagatagttttttaagtttaatagttttggttggttttaatttgaaagttaaatataatttttgttgaatgttttagtattgagtagtgagttgtgaattattttttagttgattgttattgttggtggtattgttttaatattagttttggggagatttatttttggttattttattttgtttatatttttttttttaaatttagatttttattttttttttttttttttaaaattttatttttatattttttattattttttataaatttagatttaagtaatatatgtttataaaaatttaaagttttgtttaaaagatataaagtgaaaagtaaaagttttttatatgtatttattaaatgttgaatatttattatgtgttaggtattttaattggtgtttggtatagatttgtatatttttttgggattgtgtgggggggtgttgtttgttgttattatattagtatggttttatgatatatattgttttgtaatatttttaaatttagtaatattttttgaatatttttttaaaataaa

SEQ ID NO: 341 - DNA, 2534 bp, Artificial Sequence
  chemically treated genomic DNA (Homo sapiens)
aggtaggaaagtgggatagttggggagttggattttattttttgtgagttttgttggtatttgatggtatgtggtttggagagggtaggtgatttggtgtggagggttagagggtaaatttttaaataagtggtaataggttattaatttgaaagggaaaattgtgtagtgatgggaaatgtgtttaataaatttattgggtgattaattataaaggttgggttggagttttagaggttgtttgttaaatattttattaagtggtattttgaaagttgttatttgtgtattttgggagtttagaggggattttgagggggaatgaggtttggaggatggaattatttttaggtagattgagaaggagtttggattttatttttaaatatagtttggagtttataggttagaggttttaatgggagaaaagttaaaggaagagggtgtagaaaggagttttagggaattggtggttatgtgattttgagtaaattttatttttttttgagatttagtgtttttatttttatggttttgtgtgtgttatagagatatggtggggattaaatttgattgtgatatgaaagtgtttgggaaattttatggttttatttaaatatgagttatttttatttgaattaaggggggaagttatttggtaggattaggaattttatttttttgaatttttatgggttttgttgaggttgaagtagttaggggttaaagttagtttttagtttttggaagggtattgtgaaagtggatttgatttgagaagttgttttttgatgtgggtagttatgtgatgttagttttgaataagagggggtagtttggagtttggaaaggtgttagtgtaggtggggtttatgtttagattttttttgttgattgttttgatgatttatttttatattttagtttttttatttttattgtagagttggaaagggtgtggggaagagaggagagggaggtaggttttgggttttggttttgttttttgtttttttttatttttttttgggtttggttatttagttaaaaggtaggttaagagtaggagagatatagagtttggtattggttttaggtagtagttagtttgttgtttgtttgtgtgtttttagagttatggagagagttagtttgatttagaaggttaagttggtagagtaggttgaatgttatgaggatatggtagtttttatgaaaggtgttgtggagaagggtgaggagtttttttgtgaagagtgaaatttgtttttagtagtttataagaatgtggtgggtggttagagggttgtttggagggtgttgtttagtattgagtagaaaagtaatgaggagggtttggaggagaaggggtttgaggtgtgtgagtattgggagaaggtggagattgagttttagggtgtgtgtgatattgtgttgggtttgttggatagttattttattaaggaggttggggatgttgagagttgggttttttatttgaagatgaagggtgattattattgttatttggttgaggtggttattggtgatgataagaagtgtattattgatttagtttggttagtttattaggaggttatggatattagtaagaaggagatgttgtttattaattttatttgtttgggtttggttttgaatttttttgttttttattatgagattgttaatagttttgaggaggttatttttttggttaagattatttttgatgaggttatggttgatttgtatatttttagtgaggatttttataaagatagtatttttattatgtagttgttgtgagataatttgatattgtggatggttgataatgttggggaagaggggggtgaggttttttaggagttttagagttgagtgttgtttgttattgttttgttttgttttttttagttttttattttgttgagaggattagtatggggtgggaggttttattttttttttttaggtgttgtttttgttttaaagggttttgtggagagggattggtagagttgaggttatttggggttggggattttattttttttgtagttgttgagtgtatttaattattggttatgtttttatttttgttttttgtatttgtttttttttgattttaggattaggttattttttttttttttttgttttttttttgtttttgttgtttttgattgtaggaattgaggagtgttttgttttgtggttgagaattggatagtggtaggggttggagatgggtgtgtgtgtgtgtgtgtgtgtgtgtgtgtgtgtgtgtgttagtgtaagattgagattgagggaaagtatgtttgttgggtgtgattatgtttttttttaataaagtttttttgtgatattttttttgttttttttttagtttttggtgatgggttgggagtgggattggaatttgatttagagattttgattttggatttttgagttagggttttgaattttttaggtggtttagtggtttgtatgtaagattttgagtttaggtgaggttggggttt

SEQ ID NO: 342 - DNA, 2534 bp, Artificial Sequence
  chemically treated genomic DNA (Homo sapiens)
ggattttggttttatttggatttaaagttttgtgtgtgggttattgagttatttagggagtttagggttttaatttagaggtttaaagttagggtttttaagttagattttagttttatttttagtttattgttaagaattggaagagagataggaggagtgttataggggaattttattgagaggaaatatggttatatttagtagatatgtttttttttagttttggttttgtattggtgtgtgtgtatatatatatatatatatatatatatatatttatttttagtttttgttattgtttagtttttagttataaggtgggatattttttaatttttatgattagaggtagtaggggtaggagggaggtaagaggaggggagaagtagtttggttttggggttgggaggaagtgggtgtggagagtaggggtgggggtatgattagtggttaggtgtgtttaatagttgtaagaagagtgggatttttagttttaggtggttttagttttgttagtttttttttatggagttttttggagtaagaatagtgtttaggggagaagggtggggttttttattttatattagtttttttggtagggtgggggattggagggggtagggtggggtggtggtgggtaatatttagttttggggtttttggggagttttgttttttttttttttggtgttgttggttgtttatagtgttaggttgttttgtagtagttgtatgatgagggtgttgtttttgtaggagtttttgttgagggtgtgtagattagttatggttttgttgaaagtggttttggttagagagatggtttttttggggttgttggtgattttgtagtggaagatggaaaagtttagggttaggtttaggtggatggggttggtgggtggtattttttttttgttgatgtttatggttttttggtaggttgattgggttgagttaatgatgtgttttttgttgttattggtggttattttggttaggtagtggtagtagttattttttatttttaggtagaagatttggtttttggtgtttttggtttttttgatgaggtggttgtttagtaggtttagtatggtgttgtatatgttttggagtttagtttttatttttttttggtatttatgtattttgggtttttttttttttgagttttttttgttgtttttttgtttaatattggatagtattttttaggtagttttttggttgtttattatgtttttataggttattgagagtaggttttgttttttgtaggagagttttttgtttttttttatggtgttttttatgaaggttgttatgtttttatagtgtttggtttgttttgttagtttggttttttggattagattggttttttttatggttttggggatatataggtgggtggtgggttaattgttgtttgggattaatgttggattttgtgttttttttgtttttggtttgttttttggttgggtggttaggtttagagaagggtggggaggagtagggggtgggattagggtttaagatttgtttttttttttttttttttttatattttttttggttttgtagtaaaggtaaaaaggttgggatgtgggggtgaattattagaatagttagtaggagaaatttgggtgtgggttttatttgtattggtatttttttaggttttaggttgtttttttttgtttggggttggtattatatggttgtttatattaggaaatggttttttaaattagatttatttttatagtgtttttttaggggttaaggattggttttagtttttggttgttttagttttgatagagtttataaaggtttaggaggatggggtttttaattttgttaggtaatttttttttttggtttaggtgaggataatttatgtttaggtagggttatggagttttttaagtatttttatattatgattgaatttaatttttattatgtttttgtgatatatataggattatagagatgggaatattaagttttagagaggggtgagatttgtttaaagttatatagttattaattttttgaaatttttttttgtattttttttttttagttttttttttattgaggtttttgatttatgagttttagattgtgtttggaagtgagatttaggtttttttttagtttatttgaagatggttttattttttaggttttatttttttttagggttttttttgagtttttagaatgtgtaggtggtagtttttagagtgttgtttaatgaagtgtttaataagtagtttttgaagttttagtttagtttttgtaattagttatttagtaggtttgttggatatattttttattattatataatttttttttttaagttggtggtttgttgttatttgtttgaggatttattttttggttttttatgttaggttatttgttttttttaagttatatgttattaggtattagtggggtttatagagggtggggtttagttttttggttgttttatttttttgttt

SEQ ID NO: 343 - DNA, 6558 bp, Artificial Sequence
  chemically treated genomic DNA (Homo sapiens)
taagattataaattgttttttattagtggggaaggttttaaatattatgtatttagtataagtaggtgtaattaattgtaatggtttgttttgttatttttgattaatatataattattaggttagaattgtattttataagttttttgtgtttagttattttgtatatattaatttttttaagttttgtgttttaaaagaattgtatagtgttgggaagttttttatttattttaatttttagggtattgagtttgaatttgaattaggtattaggtatgttttattattataaaagatgtaaaaagatgtgtatagtggtgtatatttatagttttagttattgaggaggttaatgtgggaggattatatgaggttgtagtgagttgtgatggtgttattgtattttagttttggtgatagtgagtttatgttttaaataagtaagtaaataaaaattaaaaagaatttagtttatagggtatttgaaggtaagaggaaaagatgttagaattagagatggggagaagatgggtttttggtgtttgttgaggttgagaaatgagatagataggttgagtgtggggtggagagaggatgggtagagagattgaggttggtttgaatggaaatgaaatgttagggtttttagggttattggggaataattggagtttttaggaaaggtttaatgttgtgattatttgtgtttgttatgtttttttattttttattaattgtgtgaatttggtagattttgagttttagtgtttttttttgtgaagtggggttattttattttaatttttgggattgttgtgtgaattaaatggggtaatgtatggagagtatttgatgtatagtgagtgttttaaaattttagtttgtattttttagtaaaggatatgtatatgtttattgtgagtgataaatttaggatgatttgaatttaatgtgataatgtgggtttttgtatgttggttatgttgttgggagatatttatggatttaattagtataataggggaaataaattatttaatgtattttgttaagatagaatattttagaatttattttgtggggtggggtataataaagggggtttttttgttgaaaatgtttaagtttaggtttgtggtattatttaattaaggttgatagttatatagtaagttagaggtaatgttaggatttaaattaaatttgtggtttttataatgaggttattttttttttttttgaatggtttggggaaagggggtgggtgggtagaatttggtagtggttaattttttatttttgttttttggtttttttttgtttttatttttaggtttgtattgattgattgattgagatagggttttgttttgttgtttaggttggagtgtagtggtatgattatggtttattgtagttttaaatttttaggtttaagtggtttttttgttttttattttttgagtatttatatttttaggtttttaaaatggtttttaggtatttggttgttgttttagatatttatttgggtttttgggtagggattgtttgggaaattttatttatgtgaagtaggtgtgggtgtaggaaggttgtttggaaatgaattagtattgttttttgtttgagttgtaagtagggtgttagagggtttggtggataagaaagggaggatgataggaggttggtattgtaatgatatgttttagttattagagggtatgaagtagttgggtaaaattttgtggggttgttggtggaaaatttttggtatttggagtttggagatggggtggatggaatgtgaggatttagttttttgaggttgggttggggtagagttattgttttggatgtttgtagggtttgtttgtgttttgattattttgtttttgtagatagttggagaatgtgagagtgggattgggattggattttaggggttattttgtataatttttttgttttgttgtgggggagggagttgtttaaggttatgtagtaagttagtggtaaatgaatatgattattattagttttaggtatatggttatttgatgggtgtagttgtagttttagtttttgagatagagatatttgattaaggataggtttttaggagttgattttagtgatttgtggttttgttgttgtttttgtttttttttttggtttttttatttgattgattttttgttttttttgtttgtttgtttgtttttgtttttgtttgttggggggtttgtttaatttttttattgggttttgggagttgtagttttttgttgttattttttagggatttgtagttttttgaagtttttttttgatttgttgttttggttttatttttgggatttagaggagaggtgattattttgtagtatagttagtggtgtgattttatggggtgagaaggatttttttgtttttaagtatttttttagtgatttttgttgttatgtggtagttgtaagtattggttggtatttggtgtgggtgagatttttattttatgtagaaatgagtaagattggtgagtttattatgtgggggtgaggttgagagaaaataagtatataggtgatttagttaaaattagaattttttaagtatatatgaaaagggtaaaaggggtgttttgtataggatagaataggtagatattgaatttggttgggttttgggaaggttttttgtagtggtttttgaagggggggttggattttagtaggatagagggtatgggtatgtgtgggtatgttttgaatagaggggttagtgtaagttgagggttttggttatattagttgtatgtgttggtgtgtttaagggatatgtagtagtaggttgagtttggagtgttttattgttaggttttttaaaaatttttaattttaatttaattttattttatttttattttaagttttggtatatatgtgtagaatgtggtttgttatataggtatatatgtgttatggtggtttgttgtatttattaatttattatttaggttttaagttttgtatgtattaggtattagttttaatgttttttttttttttgtttttatttttttttttgtaattgtttataggttttggtatgtggtgtttttttttttgtgtttatatgtttttattgtttaatttttatttatgagtgagaatatattgtttggttttaagggatagttatggggatgtattgtagtttttgagtagggaaggttttgtggaggtttttagttaaaaggaaagaatggttgtgaaaattgatgtattgtgtttttttgttttttatttttagtgtgaagggtttttattttgagttttatttgaagtaggttttgatgggaagataagtagtatgaggggtttaagtattgaggggagtaagggatatttggtggttgtgttaaggtgtagaagaggatattgggggttttaaggtttgattttatgtatattgtttaggttggtttttaagttatatggtgattgttaggaagggattagtttgtttttagtttgatttttttgttatgttattatttaaagttttttttggtagggtttgtttggggtttttgtgttagtgttttttttgttaggttgggttggggtttttatttattgttttgggattgttgttgttttggttttgggggaggagggtgtgttgttgagttattgtttgggtatttgggtttggaattttgggtgagttatttagggttgaggtagaggggttgggggaggggaagaagttatttgatagttggagtagggaggggagttggggttataggaagggtggtgttttgatgtttagatgggttgggatagataaagggttaaggaggaaggggttttgggagggggtagtttttttttgggttgggttttgaatggttatagtgtttgtttttttttgggtttggggaggatatgtgtgtggggggtagtgagagagggttgtggttgagggttgtgttttaggtttggattttggtttgggaagttgtttagttggtgtttttagttttgggtagggatgtatttttatttatttatttagtttttaagttggagaagaggaggttaaagtttttttgtttagtttttaattatttgggatttttttatgttttttatagattgtggtttagtttaattgtggttgtgtgtagagtaattttattttttattgtttttttatttttttagatatttttttatatagagggatttttttaggtatttttaagtatatttagttattttattattttattaagaggtattttggtgttggttattaaaagttattttattttatttatgttttgaagttagttttgtttttttttttttgatgttttttagttgttttttttggtttttagttttttaagggtggttttaggttgttttttttttatatatataggtgtatgtatgtatatgagtattggattatgaagttttagtgtgtgtttatagttttttatataggagtgggttgtgatttataggtatgttatgagaatgaggtttggtattagtttttaggttttagagtaggggttgtttttttttattttggtttaggatgtttagtttttatgatattttttattttttattgtggtttgggtgggtttaggggttgtttttgatttggtttagagtttttttttagttggtggtggagttggtattttttgggagggagggggttgggagggaatgagtgggaatggtaagaggttagggtttggtgggattaggttgaggtaggtttggtttttttaaaatgttaagttgggggttagtggggtttatatataaatttttattttgggagtttggttgttttgtttttttttttgggtttgtttttgttatttggtttggtgagtatttttgttttgttgagggtagggtggggaggatttttgtgggtttttgtttttgtttttatagtttttttattttagtttttttggtgggattaatttgggtttttttgggtttttttttttggaagaattttttgtgaagtgttgaagtgttgattgaagggttttttttttttttttttttttttgagatggagttttgttttgttgtttaggttggagtatagtggtgtgattttagtttattgtaaatttttttttttaggtttatgttatttttttgttttagttttttgagtagttgggattgtaggtgtttattattatgtttggttaatttttttgtatttttagtagagatggggttttattatgttagttaggatggttttgattttttgattttgtgatttatttattttggttttttaaagtgttgggattataggagtaagttattgtgtttggttgattgaagggtttttttttaggtttttttgtgaggttttagtgtaggggttgttttgaggtttttttttggatattttagtttaggggtttttttttgggggtttaggtttaggagtaggaggtgtgtatgtgggtgttgttgtaaaaagaattttgagatttttttttttttttttttttttttttgtaaagttttggattttagtaggattaaggtgtaagaggtaggggttttaagattttgtttgggttatggttttaagtagtaaagttttgttttttgttttggtgaaggtagggttggtatgatgggtttagggtatgttttgtttttggtatagtttttttggttttattttgaaatttgtttaatttttttaggttggtttgagtatttttagaggttttgttgttgaggtttgttttattttgattttaaggtaatgaatattttatatttttaattttaattttaataggattttttttggtggagagaatgttaagttgtttttattttatttatgtttttgtttgtttagaggtttaggggtttttagggtgaggggagatatattttttattttttgggagtttttagtttgagagaggaaatatttttgtttaagggagtttttagttagatggtagagagagatgtttttggttttaggagttttgagtttaaggagggaaatgatttttttagggagttttttgtttttaggttgtagttatggtttttgttagattgtataggagtttttatttgttagttggtgtatgtggttttgttttttagagtttgtgtagatgttattaaaatgggattttggttattttgttattttttttttggtagatattaaaatggggagttttgtttttaggggggtgttttaagtgttattagaggaggtttggtgatttttagatataagggaagttttagtgtttgtttttagggtgagatggaggtattgtttttggttttagggaattatagtttgagggggagatgtagtttttgtttttttatttagagaggggttttgtgaggtggtttgggggtatagggtagaagtggattttataggttgagttaaggttttaagagttttagtagtgtatttattatttggtatttttgtagt

SEQ ID NO: 344 - DNA, 6558 bp, Artificial Sequence
  chemically treated genomic DNA (Homo sapiens)
gttgtagaggtgttaggtgatgggtatattgttgaggtttttggggttttagtttagtttgtaggatttatttttgttttatgtttttaagttattttataaaatttttttttgaatgggaaggtaggggttgtattttttttttagattgtggttttttgaggttggaggtgatatttttattttattttgagggtagatgttaaagttttttttgtgtttgggagttattaagttttttttgatggtatttgggatatttttttgagggtagggttttttattttagtgtttgttagaagggaaatgatagggtgattagagttttattttgatggtatttgtgtaggttttggggagtagggttatatgtattggttggtagatgggggtttttgtgtagtttggtaggagttatggttatagtttaggagtaggaagttttttgaaggagttgtttttttttttagatttgggatttttgaagttagaggtatttttttttgttatttaattggaagtttttttgggtaggagtgtttttttttttagattaggagtttttagagggtggggaatgtgtttttttttattttgaaggtttttgagtttttaggtagataggggtatggatagggtgggggtaatttaatattttttttattaggaaggattttgttggaattagaattaaagatatgaaatgtttattgttttgggattaggatgggatagattttagtggtaaggtttttgagaatatttagattagtttggaaaggttaggtaggttttagggtgaggttagaggagttatgttagaggtagggtatgttttgggtttattatgttagttttgtttttattgaggtagggggtagagttttgttgtttggggttatgatttaggtagagttttgagatttttgttttttgtattttagttttgttagaatttaggattttgtaaaaaaaaaaaaaaaaaaaaaaaaaaattttaggattttttttgtagtaatgtttatatgtatattttttgtttttaggtttagatttttaaagaagggtttttagattgagatatttaggggagggttttagagtaatttttgtattgagattttatagaggaatttggagaaaaattttttagttggttgggtgtggtggtttatttttgtaattttagtattttgggaggttgagatgggtggattatgagattaggagattgagattattttggttaatatggtgaaattttatttttattaaaaatataaaaaaattagttgggtatggtggtgggtgtttgtagttttagttatttgggaggttgaggtaggagaatggtgtgaatttgggagggggagtttgtagtgagttgagattatattattgtattttagtttgggtgatagagtgagattttattttaaaaaaaaaaaaaaaaaaaaaaaattttttagttaatattttagtattttatagagagtttttttaagggggaaggtttagagaggtttaggttgattttattagggaagttggaatgagagaattgtggagataaagatagagatttatggggattttttttattttgtttttagtaggatagaggtatttattagattaggtggtagagatagatttaggaaggagagtaaggtagttaggtttttagggtgaggatttatatgtgggttttattggtttttaatttggtattttaaggaaattaaatttgttttaatttgattttattaaattttggttttttgttatttttatttatttttttttagtttttttttttttagagagtgttagttttattattagttgggggagggttttaggttaggttaagggtagtttttgagtttatttaggttatagtgggaagtgggaggtgttgtggggattgggtattttggattggggtgaggggaggtaatttttgttttggggtttggagattggtgttaggttttatttttatgatatgtttgtgagttatagtttatttttgtgtgagaggttgtgagtatatgttgagattttatggtttagtgtttgtgtatatatatgtgtttgtgtgtgtgagagagaagtaatttggggttatttttaggaagttgggggttagaggaggtagttgggggatattaggaggagaaggataggattgattttagggtatggatgaagtggagtgatttttaatggttagtattagaatattttttaatgaggtaatgaggtaattaagtgtgtttagaaatatttgggaaggtttttttgtgtaggaaggtgtttggaaggatggggaagtagtgagaaatggggttgttttatatatagttgtagttgggttgggttatagtttgtggggagtataaggaagttttgagtagttaaaggttgaataggaaaattttggtttttttttttttagtttgagggttgggtgggtgggtaggggtatatttttatttaaggttgaaaatattagttggatagttttttaagttagaatttaggtttgaagtatagtttttagttatagtttttttttattgttttttatatatatgttttttttagatttggagaaaggtaaatattgtggttatttagagtttagtttaagggagggttgtttttttttagggtttttttttttttggttttttgtttattttggtttgtttgggtattagggtattgttttttttgtggttttagtttttttttttgttttagttgttgagtagttttttttttttttttagtttttttattttagttttaagtgatttatttgaggttttaggtttagatgtttaggtagtgatttagtggtatattttttttttttagggttagggtagtagtagttttagagtagtaggtggaagttttagtttagtttggtagggaaagtattggtatagagattttaaataggttttgttaggaggagttttggataatgatatggtaggaggattagattgagaataggttggtttttttttagtggttattgtgtgatttgggggttagtttgagtagtgtatatgaagttaggttttggggtttttagtgtttttttttatattttggtatagttattgagtgttttttgttttttttagtatttgaattttttatgttatttgtttttttattgaggtttattttaagtagaatttggaataaaaattttttatattgagggtgagggataagggagtgtaatgtattgatttttatagttattttttttttttaattaagggtttttatagggttttttttgtttagaaattgtagtgtatttttatggttgttttttaaagttaggtggtatgtttttatttataagtgggagttgaataatgagaatatatggatatagggaagggaatattatatattagggtttgtgggtagttgtggggagaaggatgggggtaaggggagggagagtattaggattaatatttgatgtatgtggggtttaaaatttagatgatgggttgataggtgtagtaaattattatggtatatgtatatttatgtaataaattatattttgtatatgtatgttagaatttaaagtaaaaataaaataaaattaaattaaaattaaaaatttttaaaaagtttggtagtgaggtgttttagatttggtttgttgttgtgtgttttttaaatatattggtatatgtaattagtgtggttaagatttttggtttgtgttgatttttttgtttagaatgtgtttatatatgtttatgttttttattttgttgaaatttaattttttttttaaaggttattgtagggagtttttttagggtttaattggatttagtgtttatttgttttgttttgtataaagtgttttttttgttttttttgtgtgtatttagagaattttgattttgattgaattatttgtgtatttgtttttttttagttttatttttatatggtgagtttattggttttatttatttttgtatgaggtaagggttttgtttatattaggtgttaattagtgtttatggttattatatggtaataggggttattggaggagtgtttaggagtaagggagttttttttattttgtgaaattatattattgattatgttatgaaataattattttttttttggattttaagagtggaattgagataatgggttggaaaagagttttagagagttataaatttttgaggagtgatagtaggaaattgtggtttttaggatttagtgagggagttgagtaaattttttagtgggtagagatggagataggtaggtagatgaagaagataaagagttagttagatggaaaagttagggagaaaaatagagatagtagtagagttgtgggttattagggttagtttttgaaggtttgtttttaattaggtgtttttgttttaggaattgaggttgtgattgtgtttattaaatggttatatatttgagattggtgataattgtatttatttgttattaatttgttgtgtaattttgggtaatttttttttttatggtagggtaggagagttgtatggaatggtttttagagtttgattttaattttatttttatattttttagttgtttataaaggtagagtagttaagatataagtaggttttgtggatatttaaagtagtgattttgttttggtttagttttaggaagttgggtttttatattttgtttattttatttttgggttttaggtgttagaaattttttattagtggttttgtgggattttgtttagttgttttgtgttttttggtggttaaggtgtgttattgtagtgttggttttttgttatttttttttttttgtttgttagattttttggtgttttgtttatgatttaaataggagatagtgttgatttatttttaagtggtttttttatatttatatttgttttatatagatgaggttttttggatagtttttgtttagaagtttaggtggatgtttgagatggtagttagatatttggaagttattttaaaagtttagggatatgggtatttgggagataggaggtggaaagattatttgagtttaggagtttgaggttgtagtgagttatgattgtgttattgtattttagtttggatgatagagtaagattttgttttaattaattaattaatgtaagtttagagataagggtaggagaaaattaggggatagaagtgagggattggttattgttaagttttgtttatttattttttttttttaggttgtttaggggaaagagaaatggttttattgtgggggttataggtttagtttaagttttgatattgtttttggtttattgtgtgattgttgattttggttgagtggtgttatgaatttgagtttaaatgtttttagtagaaggattttttttattatgttttgttttataaaataagttttgaggtattttgttttagtaaaatgtattaaataatttattttttttgttgtattaattggatttataagtgttttttggtagtatgattagtatgtgaggatttatgttattatattgggtttaggttattttggatttgttatttataatgggtgtgtgtatattttttgttggggggtgtagattgaaattttgaagtatttgttgtgtgttaggtgttttttgtatattattttatttaatttatataataattttaggagttggaataagatgattttattttatagaggagaatattgagatttaaagtttgttaaatttatataattagtaaggggtggggaggtatgatgaatataggtggttataatgttaaattttttttagaagttttaattattttttgataattttgagagttttaatattttatttttatttagattagttttagtttttttgtttattttttttttattttatatttagtttatttgttttattttttaattttagtaggtgttagaagtttattttttttttatttttgattttggtattttttttttttgtttttaaatgttttgtggattggattttttttaatttttgtttatttatttatttgagatatagatttattgttgttaaggttggagtatagtggtattattatagtttattgtagttttatgtgatttttttatattaatttttttagtaattggggttataggtgtgtgttattgtgtgtatttttttgtattttttgtggtgatggagtatgtttgatatttgatttgaatttgagtttggtattttaaggattggaatgggtaaagaattttttagtattgtatagtttttttaaagtataaagtttgggagaattaatatatgtaggataattgaatgtaagagatttgtggaatgtagttttaatttgataattgtgtgttaattgggagtaataggataggttgttatggttggttatatttatttatgttagatgtataatgtttggagttttttttattgatgagaagtaatttatgattttg

SEQ ID NO: 345 - DNA, 6432 bp, Artificial Sequence
  chemically treated genomic DNA (Homo sapiens)
tattatgtttagttaatttttgtatttttagtagagatagggttttataatgttggttaggttggttttgaaattttgattttatgatttgtttgttttggttttttaaagtgttggaattataggtataagttagtatgtttggtttatattttttaattgtatgtataatttaatttgtagatgattttaaaagtttaaattggagttttattgttttttttatttttagtttttataataaattttatgatagtttttgtttataagaatttttttgtagttttattatttgtaaattatttaattttgtttttttgtgattttttattttttatattttttatattttttagttattgttttaaaaattttggataataaattaatttaaatttttttttaaatggtatttatttatttttatttagatttatatggattggttagaggtaggtttgagattggttgatggaggtttggtttagatttaattaggaggttggtttatatttgttttatatgtttttttttttttttgtatttgttggtttttaagtgtttttaattgaaaataattagtatattaaagtagtatattttggagtggtattttttgaaattttttattggttaggtggtgaagattaattatttgattaatttgttttagagtgtagaataagtttggaattagataggattaagtttaaatttgggttttgttttttattagttatgtgatttttgttaaatatttaatttttttaatttttaaattttttatttgtaaagggaagattagaatagtattgtaaggatatgttttaaaatttaataaggattatttttggataatagggttaagaatttttttaaagtttgtttttaaaaaaaaaatttaaattttttatttataattaatatgtattatttttgtaatttttaaaaagttattttttttaaaatatattattgatgttttttgtaaatatgtggtataattgtaggttttattaatatttgtgaagaattgtaaataagagaatggattaggaaaattgatatttttatttttttttttattgaagataagaaatatatattgaatattgattatttgtagagtatggagtgtggttttatattgaaaaaggaatattttgtgtttttaagggttttataattattagggtagaattttaaaaagtaaataaataataataatgtattttatgttagaatggggtaaatatttttttttaaaaaaaggttaaataaatgaaatgttttttgggttatttttgggaaaggagtgattatagtaggtgaagtattataaaatattttttggaggaggtagtattatggatgatttataaagggtggatgatttttataaattaattatagttttagtgtttattggtttgttttataataaaaggaaaattggttaagagataagagttgagaatgaggttggttaatttataaggagaggaatttttttgttaattgttttagttgatagtaattttaatagttgtatgttataaagtttaggggagtaggaagttttttttttattataattgagaaatttaatgtttaaataaattataatttgatttagtttaattgtgtgtgtttgtgtgtgtgtgtagagtttaaaaagttggtaaaatagattgttagtttttaaaatttttgtttaagttgatatttattgttttttaatttattaagggtttaaatgttattttttttgttttttaaattttgagttgggttattatttttttgtttttatttgtaaatggtttagttttttatatgtatatattaattgtttatgtgaatatataaaatattatattaagttaaatatataattatgtgtgaaaatgatgttttgattaagggtattagatattttttttaataagaattttaaaaggaagggtattatgataattttttttttttttttttttatttattttttgtttttgagatagggttttattttgttttttaggttgaagtgtagtggtataattatggtttattgtagtgtttgttttttgggtttaagtgatttttttattttagttttttgagtagttggtattatagatatatgttaatatgtttggtttttttttttttttttttttttttagtaaagatgaaattttattatgttgtttaggttggttttgaatttttgggtttaagtaatttttttatttagattttttaaagtgttgggattataggtgtggattattgtatttagtttgatgaatttttaaaattattaaattgtaatatgtatgagtttatatatttattatttttattatgatgatttttaaaaggttagtttgtatttggtaatgttgaattttgattttttttaattttataggagattggagattaaattagaaatgttaagggtaaataaaattaaaattaatattaatgatgtattatggtaaagattattagttaaatattttattatagatttaaatatttagtttttaataatgtaaaatatttttgtgataattaaggaaaataaagtttttggaatttattggatatttatttgttatattgtgtttttaggagaaagaaagtatatgtttgttatttggaggaatttgggtaaatgtaggaaaaaaaaaagaagaagaaagaaatttatatatttttttatttttaagaaaaggaagtagtggtgatattatttttggttaaaatgtagtttgtttatattttaaatatttggtaataatgttttttttagagttatgaagtaattagaataattaaatataatttttttttaaatttttattgtttgatttatttatttatttaataaatatttattaaatattgattatgtgtttgatgtttagggatataatagtaagtggagggaaagatatataatatttgtttttaagaaatttggagttgagtggaggatagaaatataaattaaagaatgatataaataattataaagttatagttgttaaaagaaaagtatatggtgttaagagaatgtgtaatataagatttatttatggaggtgagggaaagtttgtttattaaagaagttatgatttaatttatgaagattaggagttggttgggtgaagaaaaaaaggttagaggaaggaagtttatattggggaaggttttaagtataaagggtaggaggattatagaggtatatttatgaaatttggagaaggtttttagtaagtaaggagaagttaaatgaaagtttatgggagagttggaggtttgaagatatgtttaaggatttggtttttattttttttttattttaagagtagtgggaagttattaaatgattttaattagagggttggtataattagttttgtattttgaaaagttgaatttagtttttgtttgagaaattgagtgaaagagtttagaatggttgtggttgagggtgatttgtgggagatttttatataagttatggtagtggtatgggttggtggtagaagagggaatagggagaagatttggaatttaatttttttttattgataaagttattttagttttggtaaggtaattaattggtgggaaagaagatgtttagtttttttgattttattgtattttttgtatttttaatatgagtattgggaagtggtaaaatatttagaggtagtttgggtgttaggtggagtatgagttaaaattttaggatgaagtaaatgaatatttagaatgataggaaagatttgggagttgggtttgggggagggttatttatttttattttttggagattttggtataaatttttgtttttgtaattttttttttaggtaaaggaatttattaaatgaattgttagaagatttattgattagagggttgtatagaattatatttttgagagtgggaagtaggttgattatatagtttattatttaattaggatatatttgaaagagaaagggggttttattaatatttaaattataaaatatgtatattaggaatgttttgggtaaatttggttgttttagtaagaaaggaaatttgaaagtttatattgttttgtttttatgttattttgtttgtatatgagagggtaagtattttttttttttatttgtattaagggaataaaagtataagtatttaggtgatttttaatttatttttaattttatagtttttgttatattttatatattttgaaaattatattttttattattattattttgtgataggtgattatttataattatttattgatttagttttgggaagaggtggtgtaaaatgggatgttttatttaggtgtttattagaaatgtagaatttttgtttgttttttagatttattgaattagaatttgtatttttaaataagatttttaggtgattaatatgtatattaaaatttgagaaaaatttttagattttgatttaaagaaaaatattttataatttgatagtgtatgtatatatatatatgtatatagatataattgaagtataaatttaatgaagtagaatttattgttattattttatttgggaaagaaatgtgtttgtgatttaatagattggagtatttatttttggattttaatttgtaatttgaaaatgtatttttaaagtatttaggagtaatttgaagaaagttgaggggaggtggtagatgttttgatttattagggaaaatgtggatgttttttgttgttattttgtgaattgtgtgtatttagttatttttgagtaaatatttggagtgaggaatttttgagtggtgtgggagggtggtgaggggtagttgaaagttggttaaagtttttggaggggttggtttaggaaatatgattggtagttatgagagagttaggggttggatgttgaggagagggagaaggtttttgggtggagagaggttttgtttagttgttggtgaggagttttttgttttttttgtagtgttgagttgaagttgagtgagttatttgtgtgtatggagtgatgatatttttgtgtgtgtatttgtttgggataggagttggatttttgtgtagttttttttggttgttgggggtttttttgtgttttgttggtttttaggtttttttttggttggtgagtgggtgttatatttggtttgtatatttgtgttgttggtttggtgtggggtttggagagggtgtggtgtggaggtgtagttaggggtttgggaaggtgttgtttgttgtgttgggggtttggtttatgatgagtagtggggtttgttatgggttgggggttgtttaggggtttgtggttgttgtatattgttttgtggatgtgtattgttagtatgattttattgtatgtttagaagttgggtgagtggtttttagtttgggtttggtggggtgttgggggtttttttggggtttttgtttttttgttgtgtttgatagttgggtttggtaatttggtttttgggtggaaatgaggaaagttttttttgtgatatttatgtagtttgatttttgtagttgtagggattgtgagttttttttgaaaaagagaaggaaagtttagttgtaaggggtgtggggtatgtttggttttttttgtgtgagtaggaaaggtgttgtgttggttgtgtttgaggtgagtttttatttttggaaagggaagtttgagaagttggttatttgaaggtggttggggagtagtggtttggagtggtagtttgagttgttaaagtagttagtgtatttgggttattttgtttatggtgatgttgtgtgtttatttagttttttttgagttatttgtttaaaaggttagttttttagtttttagtttttggagatggttatgtttttttttaggttggttttttggtttggagtttttggaaataagttttaagaaaataattgatttttaaaagaaagttagttggttttattgatgttttggtatggatggatagggagtggagatgtttaggtgaaattgagaattttttattgaatgtttattgggtgttagaggttgtagattttgtttggaataagatagttttgtttttagggagttgatggttttatgtaattattgtttgttggaaattgaagggttaaaattttaattaggttatttatttgattgttgtttttgaaggtttttaaggaaaaaataaaaataaaaaaatatatatatatattatatatatataaatatatatataattatatatataaatatatataatattaatatatatatgtatgtaggaatgggggtttttaattatttgttatggaaagtgtaaaatttttgagattttaaaagttagattttttttttttggagatggagttttgtttt

SEQ ID NO: 346 - DNA, 6432 bp, Artificial Sequence
  chemically treated genomic DNA (Homo sapiens)
agagtgagattttgtttttaaaaaaaaaaaatttaatttttgaagttttagaggttttatattttttataataaatagttaagaatttttatttttgtatgtatatatatattaatattatatatatttatatatataattatatatatatttatatatatataatatatatatatatttttttatttttattttttttttaaaaatttttagagatagtgattaggtgggtagtttagttaggattttaattttttggtttttaataaatgataattgtatagaattattaattttttgaagataggattattttgttttaggtaaaatttatagtttttagtatttagtaggtatttagtgagggatttttggttttatttgagtatttttattttttatttatttatgttaaggtgttagtggagttagttaatttttttttggaaattgattatttttttgaaatttgtttttaaaaattttgggttaagaagttggtttgagggaaagtgtggttgtttttaggagttaaggattgaggagttggttttttgaatgggtggtttaaaaagagttgggtgggtatgtggtattgttatgggtggagtggtttaggtgtgttggttgttttggtagtttaggttgttgttttgggttgttgttttttggttgtttttagataattaattttttaaatttttttttttgggggtgggggtttgttttgaatgtggttaatataatgttttttttgtttgtataaaggggattaaatgtgttttgtgttttttgtaattgaatttttttttttttttttaagaaaaatttataatttttgtagttatgggagttgggttgtgtgagtgttgtgggggaaattttttttgtttttgtttgggggttgggttgttgggtttgattgttaagtgtagtggagaggtggggattttaggaagatttttggtgttttgttgagtttgggttggggattatttatttgatttttgaatgtgtggtgggattgtgttggtgatatgtgtttataggatgatgtgtagtggttataggtttttgagtagtttttgatttatggtagattttgttgtttgttatagattgagtttttagtgtagtggatggtgtttttttggatttttggttgtgtttttgtgttgtgttttttttggattttgtgttgggttggtagtgtagatgtgtgggttagatgtggtgtttgtttgttagttaggagggggtttggaggttggtgaggtgtggggaggtttttggtggttgagggaagttgtataggagtttggtttttgttttgagtgggtgtatgtgtgggggtgttgttgttttgtgtgtgtgagtgatttatttaattttaatttagtgttgtgggggaaataggaaattttttgttaatagttgggtaggatttttttttgtttgagagttttttttttttttttgatgtttagtttttagtttttttgtagttgttaattatgttttttagattagtttttttgagagttttggttgatttttagttgttttttattgtttttttatattatttaggagttttttgttttaagtatttatttaagaatgattaagtgtatatagtttataaagtaataatagaaaatgtttatgttttttttagtagattagaatatttgttgtttttttttagttttttttagattgtttttaggtgttttagagatgtgtttttaaattgtaagttgagatttaggagtgaatattttaatttattgagttgtgagtatattttttttttaaataaaatagtaatggtaaattttattttattaaatttgtgttttagttgtgtttatatgtatgtatgtatgtgtatatattgttaagttgtaaaatgtttttttttaggttgaagtttagaggttttttttaagttttaatgtatatattgattatttggaaattttatttaaaaatgtagattttaatttagtaggtttaggaggtaggtagagattttgtatttttaatgagtatttggatagagtgttttattttgtattgtttttttttgggattgagttagtgagtaattgtaaatgattatttattatgaagtgatagtggtgggaaatgtaatttttagaatgtatagagtatagtagaaattgtaaaattaaaagtgggttgggagttatttgaatgtttgtgtttttatttttttaatgtaggtgaagaaagagaatatttatttttttatgtgtaaatggggtaatatgggagtagaatagtataaatttttaaatttttttttttgttagggtaattagatttgtttaagatatttttggtgtatatgttttgtagtttaaatattaatagaatttttttttttttttagatatgttttgattggataataaattatgtgattaatttattttttatttttaaagatatgattttgtatagttttttggttagtagattttttagtaatttatttaatgaatttttttatttgagaggaagattgtagaggtaagggtttgtgttagggtttttagggaataaaggtaaatagtttttttttaaatttaatttttaaattttttttgttattttaagtgtttatttgttttattttggaattttaatttatgttttatttagtatttaagttgtttttggatgttttgttattttttagtatttatgttgaagatgtagaaagtgtagtgaaattaggagggttaggtatttttttttttattaattaattgttttgttaaagttggagtgattttgttaatggaggaagattgagttttaaattttttttttatttttttttttgttattagtttatgttattgttatggtttgtgtaggagttttttatgagttatttttagttatggttgttttgggtttttttatttagttttttaaatgagagttgaatttagttttttaaaatataaaattagttatattaattttttgattaaaattatttaatggttttttattgtttttgagataaagagaagataaaaattagatttttgaatgtgtttttaagtttttaatttttttgtaaatttttatttggtttttttttgtttattgaaagttttttttaaattttgtgaatatgtttttgtaatttttttattttttatgtttagagttttttttagtgtggattttttttttttgatttttttttttttatttagttaatttttggtttttgtggattgaattataatttttttgatgggtaagtttttttttatttttatgagtagattttgtattatatgtttttttggtattatatgttttttttttaatagttgtaattttataattatttgtgttattttttaatttatatttttattttttatttaattttaaattttttgagggtaggtattatgtatttttttttttatttattattgtgtttttaagtattaaatatataattgatgtttaataaatatttgttggatgaatgaatgaattaggtaataaagatttagaagaaaattgtatttgattgttttagttgttttataattttggagaaaatattgttattgaatatttgagatataaatagattatattttagttgagaatgatgttattattattttttttttttaagaatggagaagtatgtgggtttttttttttttttttttttttttttatatttgtttaagtttttttagatagtaaatatgtatttttttttttttgaaaatataatgtggtaaataaatgtttaatagattttaaaagttttgttttttttaattattataaagatgttttatattgttggaggttagatatttaaatttatggtggaatgtttaattggtggtttttgttatgatatattattaatgttgattttaattttgtttgtttttaatatttttgatttaatttttagttttttgtgaaattgagaagaattagaatttagtattgttaagtgtaagttagttttttgaaaattattataataaaaataatagatgtgtaaatttatgtatattgtaatttgataattttaaaaatttattaggttgagtgtagtggtttatatttgtaattttagtattttgggaggtttagatgggaggattatttgagtttaggagtttgagattagtttaagtaatatagtgagattttatttttattaaaaaaaaaaaaaaaaaaaaaaaagttaggtatgttggtatgtatttatagtgttaattatttaggaggttgaggtgggagaattatttgagtttaggagatgaatgttgtagtgagttatgattgtgttattgtattttagtttagaagatagaatgagattttgttttaaaaataaaaaataaataaaagaaaaagaaaaaaaaattgttatgatgtttttttttttgaaatttttgttgaaagggatgtttgatatttttaattaagatattatttttatatatagttgtatatttggtttagtataatattttgtgtatttatataagtagttaatatatatatgtaaaaaattgggttatttgtaaatgggaataaaaaaataatagtttgatttagggtttaaaaaataaggaaggtaatgtttaagtttttaatgagttgaaaaataataaatattaatttgaatagaaattttaaaagttgataatttattttattagttttttaaattttgtatgtatatataaatatatataattgaattgaattaaattgtggtttatttaaatgttgggttttttagttgtgatgagagaagaattttttatttttttgagttttgtgatatgtagttgttgaggttattgttagttagagtagttaatagggagatttttttttttataaattaattagttttatttttagtttttattttttgattaattttttttttattgtgaagtaaattaataagtattgagattgtagttaatttgtgagggttatttattttttgtgggttatttatgatgttattttttttaggaaatattttgtgatgttttatttattgtgattattttttttttagggataatttagggaatattttgtttatttagtttttttttaaaaaaaaatgtttgttttattttaatatggagtatattattgttatttatttgttttttagaattttattttaatgattgtaaagtttttaaaagtataaaatattttttttttaatgtagaattatattttgtgttttatagataattagtatttagtgtgtgttttttgtttttaatagagagaaaaataagaatattagtttttttaatttatttttttgtttgtagttttttatagatattaatagaatttgtaattatgttatatgtttatagaaagtattaatagtatgttttgaaaaaaataattttttgaaaattataagggtaatatgtgttaattataggtaggaaatttagattttttttttaaaggtagattttaaaaggatttttaattttattatttaaagataatttttgttaaattttggagtatgtttttgtagtattattttaattttttttttataaatgaagaatttgaggattaaagagattaagtatttgataaaggttatatagttagtaaaagatagagtttagatttgaatttagttttgtttagttttagatttgttttatattttagaataaattgattaggtggttgatttttgttatttgattagtgaaggattttaggaaatgttattttaaaatatgttgttttggtatattgattatttttagttgaaggtatttaaagattagtaaatgtagggaggaggagagatatgtggaatagatgtggattaattttttgattgaatttaagttagatttttattagttaattttaagtttatttttagttaatttatatgagtttgagtaagaataagtaaatgttgtttaaggaaaaatttgggttggtttgttatttagaatttttgaggtaatagttaagagatataagggatgtgaagggtgaggaattatggaaaagtaaggttaaataatttgtaggtggtaaaattataaaggggtttttatagataaaaattattatgaggtttgttatgggggttgaagatgaggaagatagtaggattttaatttagatttttaggattatttataaattaaattgtatatatagttaaagaatatgggttgggtatgttggtttatgtttgtaattttagtattttgggaggttgaggtaggtagattatgaggttaggattttgagattagtttgattaatattgtgaaattttgtttttattaaaaatatgaaaattagttgagtgtggtg

SEQ ID NO: 347 - DNA, 7309 bp, Artificial Sequence
  chemically treated genomic DNA (Homo sapiens)
atgtgattaatggtgttaattgttttttggattgtttttatagtataggataagattatattagttttagtaggttttattgaagaaagtttatgtgttttgtagaaataagatttttagtttagtttaataggagattaattatatgtttattttatttttttttaaggtatgatagtatttggttgagatgtttgtgtgtattttttgtgtgaagttgagtatgtaatttttaaagaaattataaaggagttatttgtttttaaaggaaaaatatatgaattttatgggtataaggaagatattaaaatagggttggggagaagtttttttttttttattttatagtattttttatagaaataattgattgtttgaatatatggttattgaaatatatatatatatatatatatgtatatgaaaataagagttggaatatttgattttgttttttattttttattattttagataatataggatataatatggttttattgtatatatgtgttttttggtttaaaaatattgagagtagatttttgtggaaagaaatatgaaaatttgaggatttatgtgaatgtagttagaggtgaatgtagttagaggggtttttaatttgttggtagagttgggggagagttggggtaattttattgttatgaaattggttttagatggaggtaaggaaaggtgtttattttttgttggtgttagatatagagagattttgtagtattttgtattttaggtttagaattgtttagtgttgggtagtagttttattgagggtttggttagagtttatggggatgggtggattaggttgtttgttgtttggaaaaggttattttgaatataatgatttttatatggatggtggggtttgggggaaggtattgtggttagggtttggaggggaagagggaggaaagtaaagaggagtttttttatgaggtaatagaaatgatagtattttttttaggttgaatttttaaaatttagttttgttttggaagattgggattgtggtattttttgtagtgtttttagattgttttaaggtttttaaattaatgatttataattatgttgtttttttagagagtatttttttttttggttgatatgtggttagtttaggggtggaggagttttggtagttatgaatttagatgggatgttgattgagagttttgtggttatggtagatgggaggggtgagttttatttatttaaaggtatttgtattttattgatgagtgtggaattgtgtttttttgtttttgtagtgagatgattgattaggattgtaggttgagtaaatgggtgttttttggtttatagtgttttttagtattagttagtgggatagagttttgtgaattttttaaggagttattatttgtttgtttgaatgttggaaaggggttggtggtgttgattattggatttatttaattaatatttattaaatttgttgttattaatatttaatttttgtgttttaggggtttagattttagtaagggaaatagatgggtaaataattatattagagttagttaagtattgttaaagaagttgatatagggtgttgtggggatatatgggaggggaattagaggaggttttttggaggaggtgatatttaagttgaggtttgaaggatgtggaagagtttagtaatttttgaagattaaaaaaatggtgataaaaaagatatttttttaattttttagtgttatgatttaagagataaataagtaggtgaatgtataattatattgggttttattataagttagagtttgttttttttaggattttggtattataattttttttgaaattttgtttttggtattgatttttgggggaggtagtaatataggaatttagtgtttgttgtgaaattgatggatggtttttagttttgggtatgtttttatgtgttaaatttgtttaaatggtaggatttattttttttttagaagtatttatttgttttataggattttttatggaattttggagtttttgaggtgagagggattttggatattattgagttttattttttatttaataaatatagaagtggatgtttggataggtaaagtgatttgattaaggtaggtgtatagttattttgtaatattgggaataaattttaggttttttgattttttgtttttattttattttttttttattttttagaaataaagtttttatgtgtttttttttatagtgatatgtttggaatgtattagttagtaatttaggaagggaaaaaaataaatatataagagataaatttgttaggaggataaatttgtattgtttttgattggtttagagggtgattattattatggtagagaattatttaattagtgtaagtaaaatttttttgtgggttgggtattgtataaagatttaaatgaatttgtttatagatttgaaaagtagatatgagatttgtgaatggttggggtttttaagtttatagtataagtatgggttatattttatagtttggaggattgagttttgaaaatgggtaagtttttttatttttttgaattttattttttttatatttaaaataaggatgagtagtttttgaggttttttttatgatttttttttttatagattttagtattttataatttgatataaagagggtggatatgaatttattttttttagaaaagttttaggaaagagaatattaggttattttagtaggtgtgtagataggttagatagattttgaaatttatttagttttttttagatgtataattttattattgtttttagttgttaagagaaagtaggagagtttgtatttttattttttttttttttttttttttttttggagatggagttttattttattatttaggttagagtgtagtggtatgattttagtttattgtaagttttgttttttaggtttatgttatttttttgttttagttttttaagtaattgggattataggtgtttattattatatttggttaattttttgtgttgttagtatagatggggttttattatgttagttaggatggttttgattttttgattttgtgatttgtttattttggttttttaaagtgttgggattataggtgtgagttattgtatttagtttgtatttttatttttattgttagttttaggtttattttatttagtttattaagtgatgttgaataattaatttttatatattattaggtttatggatattatgatatttagattgatgggtgtttgttgaagggggtgattttagtaggaggatttttttatgtaaggatttatggagtttgttgttttttttttttagggtgagaattaaattgtttttatatggtgggtagaggggaattgatttaggtttggaataagagagaatattttaattgaaaagtttttggaatttgttgaattttaagatattgtgtggattagtttaggatagggagtgagaagaaattaattaaaaggtaattttgttattttttagttggaaaaaagattagattatatttgtgtttttataattaagtagttgttggaaaaaaatgttttagatgttttttatgagaaaattgttgtttgaagtttagtagaagttatttatttgatatttatattttaggtaaggttttttgttggagaaaatattggtattttggataaaattgaaatgtgaaaagaaagggaagagagggtttttattatgtaagatgtttatttaaagtggatttggtttggaaagttttttaaaattttttatatgattgtggaataagttatgtggggtgtggggataagtgaattttttaaattttattatgtatgtttttatttaatttggatttttagagtggtttttagggtattttgtttaggatttagttagttgttggttatatttatgttttttagttttttgagattttatttggttttgagagggttaaaaagtagtgtggttaaatattttaggttttaaagtatttttattgtggttggggaagtaatagaattatattttataaaataatgaaaatagtgttagaaaaatattgagagatagaaatatttttatgagttaggttatagttagagtgaaggtagggaaggtttttaaagttgggtggaggggataagttaaaaagatgtggaaattggttttttttttttatggttaaagtgtttaaaggggaaaaaggagttttaaaaatgtttttggaaatattattttttatgaattttttggtttttgttgttttaatgttatttgtttgagatgtaaatagaggagttttgagaaagaagttgaatttgtatttttttttgtttttatttgttttaaatttgtggtatttttaataggatgaagtggaagagaaagggaaagagataaaagtgtagaaagatggaagattttagttgtaaatggttatttgtagttagatggaatagttgttgatgtttagggaaatgtatgtttttttttagatgggaaggagtagtggaaaggggtgatgagtttttggttggttattaattattttatttttttgtgttggttttttatttggaaagtgggagtgatatttgtgtttgttttttttatttataaagattattgtgagagttataatatggtgagatatagaattttgtttttaaaaatataaagtagaattaagatgttaataataaggatagtaattgtgttagttatttgtaattatttattatagttagttgtttaggattttggattgtttttttggttttattatagttttggattagtttatttttaaattttttgttgaagggtggagttttgttagttatgggtagggaattatttttttttgtttttttattttttgttttttaaatatgtttagggtttttgtatttgttgttttttttgtttggtattttttttttgtggtttgttttagagttgatttttgtttttgtttattttttagtgaggatggtattttagggagttttttttttattattgtagagagagtaggttttttttagttatgtttaatttagaattttgttttgttttttttatagttttagtattatagaaaattattttgtgtatttatggatgtttatgggggtaagggttttgtgttgtttaatttagtattttgaattgtgtttgttgaatgaatatagaattttgtttgttttgggagagtatagaaaatagttttttattatatattatagttagttgtaaatagtagatggttttttatattttagagagtaagaattagagagagagagaaagagagagagtttgggttttttttttttgtgtttgttttttttagagaaattggaggggtagtagttagtatttttttgttggttttattaagtatagttaaggtttttaggatatggttattttttatttgtggaagtggttttgttggggtgggtgggtgttagttggttttggtttgggttagagatatttagtggtttaggtgggtgtggggttagggtgtagatgagaaggggtatgagggttttgttttgaggatttagtggtaagtattggttttgggtgtgttttagtttatttatttgtgtgtttatggtggtattattttttataaggatttgaatgatttgggggtggttttgttttgttattttttgtttttggttttgttttttttttggagggttgatgaggtaatgtggttttgttattggtttgagggggtgggttttaatagtttgaggtggggtttttgggggtttagtgttatattatttggttgtttaggtagtggtgtagagtgggtagtaggtaggtggtgggtgtttagatggtttttttttttttttttgtttttttagtttttgtttttttgttgggaggttgtttgttgagttttgtgttagtgttgaggtagttttgttgtgttttattttgttttgttgggtatttggagggtagtgtgttggaggttaaggttgttttgtatggtttggtgggtgagtgagtttgggttgtagtagttttgttggtggtgtgtatggtaattttggagaggtgagtagtagttttggtagtggtggtagtagtggtaatgattttttggtttgggtttattgtgtttttgggtagttggagtttgggggattggggtgttgaggtgtgtatatgtttgtttagttatttttaggatgttttttgtaattttgatattggtaagtgtttttggtgttttgtttgagttttatgttgtagttaggattgtagtgttgtttagggaggtagggtgagttttattttttttttttgttttaggagaggggtagatggggttggggtggagtggagaaatttgatgtttttgggtgggggtgttggtatagttgagaggggaagatgttttgtagaggaaatttatagtggttgagggagtttttggttgtttttgtttttttaatttaggttgtgaggtttttattggtttttttgatatttggaaaatgtttttatttattattaatggaggaagggttagaagagaagggtggggaaagggtttttaaaatttggaatgttaattaaagtgttgggaaattgaatagttaaaaaaaaaaaaaaaagttgtttgttatgtgtatggaaagttgtaggagaaatttggagtattttgagtttgtattattttttgtgtttatgaaatttattttttttattgagatttaatttagttgtaggttttttaggtaagtgttaattgagtttttgggattgttaagtttgggtggatttaagggggaaaatgaggagaaagttgtggtattgatttatgttttggaggtattgtgtttgagagtgttgatagttagtagaaggtgtgaggggttatttattatatagttgtgaaaatttataggaaggttattttttttttttttgaatgtgtgtggggagggggagaatgggtagtggaaaatagatttgttattaaaagaataaatttgttaagggttatattatggtgatagttttagattggatttagtgttttgagtagagagattttgtaaagagattttttattttttagtgtgtatggagggttttgagagtattttgggaggtttgtttgggagtgtttgggatatttgtgtttggatggttaaaggtggagtggtatttgggaaatatttttttttttttttttagtttataaag

SEQ ID NO: 348 - DNA, 7309 bp, Artificial Sequence
  chemically treated genomic DNA (Homo sapiens)
ttttatgggttggaaaggaggagagagatgttttttagatgttattttatttttagttatttaaatataagtgttttaaatatttttagataagttttttaggatgtttttggggttttttatatatattaaggagtaggaggtttttttatagggtttttttatttaagatattaagtttagtttggaattgttattgtgatgtgatttttggtaggtttgtttttttggtgataaatttgttttttattatttattttttttttttttatatatatttaagggggaaaaaaatagtttttttgtgaatttttatagttatgtggtgagtgattttttgtattttttgttggttattaatatttttaaatatagtgtttttagggtgtgggttaatgttatagttttttttttatttttttttttaaatttatttaaatttggtagttttagaagtttggttagtgtttgtttgggaagtttgtagttgggttgggttttagtgaaaagaatgaattttataggtgtaggagatgatgtagatttggagtattttaagttttttttgtaattttttgtgtatatggtgggtaatttttttttttttttttaattatttaattttttagtattttagttagtattttaagttttgggaattttttttttattttttttttttagttttttttttgttagtagtgaatggggatattttttagatgttaaaaggattggtaggaattttatgatttaagttaggaaagtaaaggtggttaggggtttttttagttattgtgagttttttttgtagggtattttttttttttagttatgttagtgtttttgtttaaggatattgagtttttttattttgttttaattttgtttgttttttttttggggtagaggaaaggagtggggtttgttttgtttttttaagtagtgttgtagttttggttgtagtgtggggtttgggtggggtattaggagtgtttattgatgttggagttgtagaaggtgttttgggggtggttgggtgagtatgtgtatgttttggtgttttagttttttaggttttagttgtttaggagtatgatgagtttgagttaaggggttattgttgttgttgttgttgttgttggggttgttgtttgtttttttaaagttgttgtgtgtgttgttggtggggttgttgtagtttgagtttgtttgtttgttgggttgtgtggggtaattttggtttttggtgtgttgttttttgagtgtttggtgggatgggatggggtgtagtgaggttgttttggtgttggtgtaggatttggtgggtggttttttggtgaaggagtaggagttggaggagtaagaggaggaggagaagttgtttgagtgtttgttgtttgtttgttgtttgttttgtgttgttgtttgggtggttgagtgatatagtgttgggtttttggggattttgttttgggttgttggggtttgtttttttagattaatggtagagttgtattattttattggttttttaaaaagggggtggggttgggggtaaggggtaatggggtggggttgtttttggattgtttagatttttatagggaataatgttgttgtgggtatgtgagtgggtgggttggggtgtgtttgggattggtgtttgttgttgggtttttggagtggagtttttgtgtttttttttgtttgtgttttggttttatgtttatttgggttattgggtgtttttgatttaaattagaattaattaatatttatttattttagtaggattgtttttataggtgaggggtggttatgttttagagattttgattgtgtttggtggaattagtgggggaatgttaattgttatttttttagtttttttggagagagtaggtatagaggagaaagatttaaattttttttttttttttttttttttggtttttattttttgggatatgggaagttatttgttgtttgtagttggttatgatatatgatagaagattgttttttgtgtttttttagagtaaatggggttttgtatttatttaataaatatggtttaggatgttgggttaagtaatataaagtttttgtttttgtggatatttatgaatgtatagggtgattttttgtgatgttagggttatgaagaaaataaaatagagttttgggttggatatgattggggagggtttgttttttttgtgatagtaagggaagggttttttgaagtgttatttttgttgagaagtggataaagataaggattagttttggggtaagttataggagagaggtattaggtagggggaatagtaagtgtaaagattttgggtatgtttgaaagatagaaagtagaaaggtaagaggaagtggttttttgtttatggttgatagagttttattttttagtaagggatttgggggtgagttgatttaaaattgtagtaaaattaggagaatgatttaggattttagatgattagttataatagatgattgtagataattaatataattattatttttattattgatattttgattttgttttgtatttttaaaagtaggattttgtattttattgtattatagtttttataataatttttgtgggtaggaaaagtaagtataagtattatttttattttttagatgaggaattggtatagaaagatgggatgattggtggttagttaggaatttgttatttttttttattgtttttttttatttgaagagagatatgtatttttttgaatgttagtagttgttttatttaattgtaaatggttatttgtagttgggattttttatttttttatatttttgttttttttttttttttttttgttttattttgttagaaatgttataagtttggaataaatagaaatagggagaaatgtaagtttagttttttttttagaatttttttgtttatattttagataagtgatattgggatagtagaggttgaagaatttgtgagagatggtatttttaagaatatttttgaaattttttttttttttttgagtattttagttataggaaagggaaattagtttttatatttttttgatttgttttttttatttagttttaaaaattttttttgtttttattttaattgtggtttaatttgtagagatgtttttgttttttgatgtttttttagtattgtttttattgttttatggggtatgattttattgtttttttaattatagtaggaatattttgaggtttgggatatttagttatattgttttttagtttttttagaattaaatagggttttaggagattggagagtatgggtgtggttaatagttgattgagttttgagtagagtgttttggaggttattttaaggatttaggttgaatgagggtatatgtggtggaatttgagagatttgtttatttttgtgttttatatgatttattttatagttatgtggaaggttttagaagattttttagattaaatttattttggataagtattttatatgatagaggtttttttttttttttttttttatattttagttttgtttaaagtgttgatattttttttaatggaaggttttgtttggaatataagtattaagtagataatttttgttgaattttaagtagtagtttttttatagaaagtatttgaagtgtttttttttagtagttatttaattatgaaagtataagtataatttgattttttttttagttgaaaagtaatgaaattattttttggttaatttttttttattttttattttaagttggtttatatagtgttttgaagtttagtgaattttaagagttttttagttgggatgtttttttttattttaaatttgagttagtttttttttgtttattgtgtgaaggtagtttggtttttattttaaggaaaagaaatagtaaattttatgaatttttgtgtaggggagtttttttgttagggttattttttttagtaggtatttattagtttggatgttatggtgtttatgagtttaataatatgtaagaattggttatttaatattatttaataagttaggtggggtgaatttgaggttaatagtaagaatgaagatgtaggttgggtgtggtggtttatgtttgtaattttagtattttgagaggttaaggtgggtggattatgaggttaggagattgagattattttggttaatatggtgaaattttgtttgtattaataatataaaaaattagttaggtgtggtggtgggtgtttgtagttttagttatttgggaggttgaggtaggagaatggtgtgaatttgggaggtggagtttgtagtgagttgagattatgttattgtattttagtttaggtgatggagtgagattttgtttttaaaaaaaaaaaaaaaaaaaaaaagaatgaagatgtaggtttttttgtttttttttgatagttaagaataatgatagagttatatatttgggaagaattgagtaagttttaagatttatttggtttgtttatatatttattaggatgatttggtatttttttttttggaatttttttaggaaaggtgagtttatatttattttttttgtattaagttataggatgttagagtttgtaggaagagaagttgtaaaaaggattttagaaattatttatttttgttttaaatgtgggaaaaataaggtttagagaagtgaaggaatttgtttatttttagggtttagttttttaagttgtaaggtgtggtttatgtttgtattgtgggtttggaaattttagttatttatagattttgtatttgttttttagatttgtagatagatttgtttgagtttttgtatagtgtttagtttatagagaaattttatttatattgattaaataattttttattatgataataattattttttgagttaattagaagtaatataggtttgtttttttgataggtttattttttgtgtgtttatttttttttttttttaaattattagttaatgtattttaaatatattattataaaaaaaagtatatgaaaattttgtttttgggaaatgaaaagagagtaaagtggaaataaaaaattaaaagatttgagatttgtttttaatgttgtagaatagttgtgtatttgttttggttaagttattttgtttgtttaggtgtttatttttgtgtttattggatgaaagatagaatttagtggtatttaggattttttttgttttaaaaattttaagattttatggggaattttgtaggataagtgaatgtttttgaaggggagatgggttttgttatttaaataggtttgatatatgggaatgtatttaagattgaagattatttattagttttgtaatgaatattgagtttttatattgttattttttttaagaattaatgttgaaaatagaattttagagaagattgtgatgttaaagttttaggagagataggttttggtttatggtggagtttagtgtagttatgtgtttatttgtttgtttgttttttggattgtagtattaaaaagttaggaaggtgttttttttattattatttttttggtttttaggagttattgaatttttttatattttttagattttagtttagatgttattttttttgggaaattttttttgattttttttttatgtatttttataatattttgtattaatttttttgataatatttagttgattttaatgtgattatttatttatttgttttttttgttggagtttaagtttttagaatatagggattaagtgttggtaataatgagtttaataagtattggttgaatgggtttaatgattagtattattgatttttttttagtatttagataggtaggtggtggttttttggagagtttatggagttttattttgttggttggtgttagggggtgttataagttagagaatatttatttgtttagtttgtagttttggttggttgttttattgtgagggtgggagagtataattttatatttattggtggggtgtgggtgtttttgagtgggtgaagtttattttttttatttgttatggttataaagtttttagttaatattttgtttgggtttgtggttgttggagtttttttatttttgagttggttatatgttaattaaagggggagatgttttttggggaagtaatatagttgtgaattattggtttgggggttttagggtggtttgggaatattgtagaggatgttatagttttagttttttagggtagagttgggttttggaaatttaatttggagaaggtattgttatttttgttgttttatagggaagtttttttttgtttttttttttttttttttttagattttagttatgatgtttttttttaagttttattgtttatgtgaaagttattatatttaaaatggttttttttaagtaatagatagtttggtttatttatttttatgagttttggttagatttttagtggggttgttgtttagtattgggtaattttgagtttaagatgtgaggtattgtaggatttttttgtgtttggtattagtagggggtaaatatttttttttgtttttatttggagttaattttatggtagtaaaattgttttagtttttttttagttttgttagtaaattgaagatttttttggttatatttgtttttggttatatttgtatgaatttttaggtttttatatttttttttatagggatttatttttagtgtttttaagttagaaaatatatgtgtgtagtaaagttatgttgtattttgtgttatttagggtggtgggaaatggaaagtagagttaaatattttagtttttgtttttatgtgtatgtatgtgtgtgtatgtatgttttaatgattatatatttaagtagttaattatttttgtgaagggtattatgaaatggaaggagaagaatttttttttaattttgttttaatgttttttttatgtttgtggagtttatgtgttttttttttaaaaatgagtagtttttttgtggtttttttgaaggttgtatgtttagttttatatagagaatatatataagtattttagttaggtgttgttatgttttgggagggaatgggatggatatgtggttggttttttgttagattgggttggaggttttgtttttgtaaggtatatgagttttttttagtggaatttgttggaattgatatggttttgttttgtgttgtggggatagtttaaagagtagttaatattattgattgtat

SEQ ID NO: 349 - DNA, 15863 bp, Artificial Sequence
  chemically treated genomic DNA (Homo sapiens)
agttttaattttgtaggtttaagtgatttttttattttagttttttaagtagttgggattataggtttaatttttttgatagagataggatttggttgtgttattaaggttggttttaaatttttgggtttaagtatttttttattttggttttttaaagtgttgggattataggtatgagttattatattagttataaaaattttttgaatataaatttattggttaggagtagtgtttatgtttgtaattttagtattttaggaggtgtaaatgggtggattatttgaggttgggagtttgagattagtttggttaatttggtgaaattttatttttattttaaatattttaattagttgggtgtggtggtgtgtgtttgtaattttagttatttaggaagttgaggtagtagaattgtttgaattgggatatagaggttgtagtgaggtaagattatattattgttttttagtttgggttatagagtgagattttgttttaaaattttttttttttaaagaaagttaaaaagaatataaattgattatttgtattgtaagatatattttttaaaatgttttaatattataattattaatattataattatgattttgatgaattatttttgagagttgaaaatttgatagttgttattattgttttagaaagtagtataaaaaagaaagagtgttgatggaggaggagaaggtttagtagagttttgagtgtttgagtgttttagtgtagggaggtggagatagtgatttatgttgttaagagatgtagtgaggtgaatttagagaatgatttaagaggggttgggtgtggggtttatgtttgtaattttagtattttgggaggttgaggtaggaggattatgaggttaggagattgagattatggtgaaattttgtttttattaaaaatataaaaaattagttaggtgtggtggtgggtgtttgtagttttagttatttgggagaggttgaggtaggagaatggtgtgattttgggaggtagagtttgtagtgagttgagatggtgttattgtattttagttgggtgatagagtgagattttgttttaaaaaaaaaaaaaaaatattttttttatgattttttaaataaattttaaatgttttatttataagaattaatatgatgtggttgtttttttttgtttttatttttttgttttttttatttgttttagtttggttatattagtattttgggttttttgttttgtgtttgtttgtttgtttgtttgtttgtttgtttgttttgggatggagttttattttgttatttaggttggagtgtagtgatatgattttggtttattgtaatttttattttttgggtttaaatgatttttttgttttagttttttaagtagttgggattataggtatttattattatatttagttaatttttgtatttttgtagagatgaggttttgttatgttggttaggttggttttaaatttttgattttaggtgatttgtttattttagttttttaaagtgttgggattataggtgtgagttattgagtttagtttgttttgttgttttttgagatggagttttattttgttgtttaggttggagtgtagtggtataattttgtttgattgtagtttttattttttgagtttaagagatttttttgttttagttatataagtagttgggattataggtgtgtgttattatatgtgtttaattttggtatttttagtagtgatggggttttgttatattggttaggttggttttgaatttttggttttaagtgatttgtatattttggttttttgagtagttgggattataggtgtgagttattatgtagggtttttttggttttttaatgtataaagttattttttagttttgggtgtttatagtattattgttagtttttggaaagttttttttagaagtttttatatgattgattttttatttttttttaggttttagtttaaatgttttttttttagagagtttttttttgattattttatgtaatgtgtttttttttagttagtttttttttattttgtgtattttttttagagtatttattattattttggttttgatgtttgttggtttatatgtttgttgtttgttttttatatagaaagtaaattagttttttatttgttttgtttattattttattttagtatagtgattaatatatattagtagttaattaataaatagttataagttaggtatggtgatttatatttgtgatttttgtattttgggaggttaaggtgggtggattttttgaggttaggaatttgatattagtttgtttaatatggtgaaattttgtttttattaaaattataaaaattagttgagtgtgatggtgtgtgtttgtaatattagttatttgtgaggttgaggtaggagaattgtttgaatttgggaggtagaggttgtagtgagttgagattatattatagtattttagtttgggtgatagagtaagattttgttttaaaaaaataagaaatagaaatatatatatgttgttataagaaatttattattttttagtaaaaaatatagatttttaattaaagaaaggggaaatttttttttaaataattttagaatttggggtagaaaatgttatatgtggaaatttgttttgaaaaatagttttgtttgtgaataggaaatatttggattatattttttttatttttatgaaggatttaaatgtgtagtattgatgaagaggtagttagttttagtttttattatttttgtatattttatttgtttttttttatggtatagttttgggggtaggttataaatttgtaagatgttattagtattattggttaagatgtaggaattgttaggagttttagaaataggggagagttagaaagttggttagatttatgttttttaagtgtagggttagggttgagtttgtttttggggtaggtaagtttttttgaatttttgagggaagtagaagatataaattgttagataaaatgtaagtttagtttaaaagggttatgtgttgttttttttagttttggggtattttttttttagaaaattggattgttttatagtgaaaattttgggggtggttagttttttgttttgttgttatttttattatttatagttttttaagaagtttttaggttgggtgttgaattttgattaggaattattgagaaattgaggtagttgggagaagttgtagttttaagtgttgaaaggaagatgggggataataaatttgggttgttaagtaaagggggtagaggtttggagaagtgggttttaggattagaggatagattgattttatattttatttttttagattttatattttattgttattattatttatgtgttttttttgttttttgtagtgggttttttagaggtattttttatggtttttttagattttaattttggtttgtttgttttttttttagaaaggtttttgtttgttttttttgtaggaaggtttgtatttttagaaagtttttgttttttgatttgaggatttaatttattaggggaattaaattttgtttttaggggagtggagagagaaattgggttttttttttgtagtttttgggatatagttgagttagttataggatttggggataattggggtggatttttttttttgggaggtggtggtattagtttagagtttgtatttttatttattggggaagtgtggggagaaggatgggttggagttgggttttggtttgaaggatagtagtttggagttaatggttgagtttttaaagtttttatattgtagaggaagtatagtggagattagttttagttaggatggttttgaagtttttagggatttgatgtagagttaaagaaatttatttgtgtttttttttttttttgggagtaggtagaagatttttgggaggagaggtgaatagtggatgttaatttttttgaaagtattgtgttttttagtattgtgggttgttatgggttttttgttgttgtgggattttggtttattttttgattgggttgttgtattttggattagattttgtgggtgatttatggaatttgtggagttgggatgtgaaaggttagaaggttttttgtttttattaagttttagggttttttgtggttgttgggagttgtagtttgaatgtttttattttggtgagaagtgtttatgttttttttattgagttttgtggtaatttttaaagtatttgtattgtttttttgttgtttgtagagggtgtagtaggttttgtattttttttgtattttattttttaggttttagatttgttttttttatttaaaaaatatttattattgagtttttatttgttatttagtattgatataggtatttaggaatataataatgaataagatagtagaaaaattttatatttttataaggtttatgtttttatgtattgaaagtaatgaataaataaattttattagagtgataagggttgtgaaggagattaaataagatggtgtgatataaagtatttgggagaaaatgttagggtgtgatattatggaaagtttttttaaaaaatgatattttaattgatgagaagaaaggatttagttgagagtaaatgtaaaagtttttttttttttattttttatatttgatataatgtaggatttttttaaaatgatttttattaattttgtttttatagttttggtttgtagaattttttattttaaaatgttagtatttatggtattaggttggtgagaattttgattttgtatttttttttttaattttattttttttgttttttttggtaggtggattatttgtttttatttgttatggtgattgtttagttttgtgttaggagttttgtaggggttgatgggattggggttttttttttttatgtgtttaagattggtgttaaaagttttgagttttttaaaagtttagagttattgtttagggagtaggtagttgttgggttttggggatattttgtgtttgggttgggagtgtgttttttatgatggtgatatgtttttttggattgggtaagtttttgattgaatttgatgagttttttttgagttatgggtttttggttttgtgtatttttagtttgggaaaattgttggggttgggggtggggtagtggggatttagtgagtttgggggtgagtgggatggaagtttggttagagggattattataggagttgtattgttgggagatttgggtgtagatgatggggatgttaggattatttgaatttaaagttgaatgtttaggtagaggagtggagttttggggaattttgagttggtttaaagtgtatttttttgtatatttatttggtgttgggtgtagggaatttttgaaataaaagatgtataaagtattgaggtttgagatttttggattttgaaatattgagaatttatagttgtatattttagagtttatggtattttagtgaaaattggggttttattttgaaatgattatttgggggtgatttggggagtttaagttgttaaggttttataatttttggatttttgttttttttggagtgatttttttaggtagtttttggttttgttagatggagaaaatttaattgaaggttgttagttgtggaagtgagaagtgttaaattaggggtttgtttgttaggttgaggaggattgttgtaatttgagaggtttggtagttttgttattgtttggttttatatttatatttttgttttttgtagtagtatttttggtttttttttgttggagtagtttattatttatttgatgagaggggaggagagagagagaaaatgttttttaggttggttttttttatttggtagagggaggttgttattttttgtttgtatttttttttttggattatttagttatggtttttgtaaaggtaggggtatttgttttgatgtaaattttaatttttttttttttttgaatggtgtgttttattttttgggttgtttgtaatttaggtggatgttattatggtgtagatagggagggaaagaagtgtgtagaaggtaagtttggaggtatttttaagaatgagtatattttatttttttggagaaaaaaaaaaaagaatggtatgtttgagaatgaaattttgaaagagtgtaatgatgggttgtttgataatttgttgggaaaaataatttatttgttatttagttttgggttaggttattttagttttagatgtaggttgaatgttgtgaagtggaaggggtgggtttgtaggtgtttgtgtggttttttgtgtagtttttggtttgagttggttttttttggtaggaggtggaatttgaatttattttttttgttgttttattttttagtttgtggttgttttattttgtagtttttttttatgtatttgttgtgtattggttattttgtgttgtatttatgttattttttttttaaattgaggtggtatttatatatagtgttagtgtatatagtaagtgtataggaagatgagttttggtttttaattgttttgtgatgtttattaagttatagattttttttattgttttagaaatgttttattatgtttttttttagttgatttttgattttatttttattttgatttttataattattttgtttgttggagaattttatatagaatggaattaggatgggtgttgtggtttatgtttgtattttggtttatgtttgtattttgggaggttgaggtgggtggattatttgaggataggagttttagattagtgtggttaatgtggtgaatttttgtttttattaaaaaatataaaaattagttgggtgtggtgggtgtttgtaattttagttatttgggagggtgaggtaggagaattgtttgaatttgggaggtagaggttgtagtgagttaagattgtgttattatattttagtttgggtgataagaatgaaattttgttttaaaaaaaaggggggaattatatattatgtgtttatttttgttgggtttttgttttttaatgtattgtttgatatttgtttatgttgtatatattagtattttgtttttttttatttagtatagtttattgattgtatatttgtttttttgatggttttttgagttgttttttatttgtggttatgaaataaagttgttataaatatttttgtataattttttttgtgattatatgtttttgtgttttttggagaaatatttaggaggggaattgtggaggaagtaaaaagtagttgtattttgaatttttttagaagttttgagttttttagagtggttgtattattttatattttaattagtaaggtatgggagttattatggttgtgttatagttttttggatattaggtatgttagtttttttaatgtggtatatttttgtggttgtaatttatagttttttattgattaaggatgtttagtatttttttatgtgtttattggttatttgtattttgtttgtaaagtagttttttgagttttttatttgttattttggtttttttgtttgtttttattgtttagttgtgggattgttttatattttttggatataagtttttattagatttatgagttgtgaatgtttttttttgatttgttgtgggtttatttgtttgttttatagagtttatagaattttaagaggagtggattaattttttttatgtttagtatttgttttgttttgtttaggatatttttttttttttttttaattttagggttatgaagatataattttatatttttttttaggatttttatggtggtaagttttatagtaaggtttttaagttattaattaatttttaaaattaattgtttatggtgtgaggtgtaggagttagtttttggtattttttttgtatggaaatttagttattttgtttttatttgttgaaataggttttttttttttattgaatgtttttaattttaattattttatagttggagtatagggttattattttagtgttattttttttttttttttgttaatttttgagatagggatttatattgttgtttaggttagagtataatggtataattaaggtttattgtagttttgaatttttgggtttaagtagttttttagtagttttatgagtagttgggattattttattatatttagttaattattttatttttttgtattgataggattttattatgttgtttaggttggttttaaattgttggttttaagtttttattttattttggttttttaaagtgttgggattataggtgtgagttattatgtttgattttttagtgttattttttatttattttttttgttttttgttttttttaaatgttggaggaagaaatagtatttattttatataaattttttagaaaatagaggaatagattgggtgtggtggtttatatttgtaattttagtattttggtatgttgaggtaggggattatttgaggttgggagtttgagattagtttggttaatatggtgaaattttatttttattaaaatataaaagtagttaggtgtgtattatatttgtaatgttagttatttaggaggttgaggtataagaattttttgaatttgggaagtggaggttgtagtgagttgagattgtgttattgtattttagtttgggtaatagagtgagattttgttttagaaaaaaaaagaaagaaagaaaaaatagaggaatattttttaatttgtttttgaagttaggataattttggtattaaaattaaataaggatattataagaaaagaaaatatagattaatatttttgttagtatagatatgtaatagttaattaattttagtaaattaaatttggtaatatagaaaaaaggataaataggttagttgtggtggtttatgtttgtaattttagtattttgggaggttgaggtaggtagattatttgaggttaggagtttgagattagtttgattaatatggtgaaattttgtttttaataaaaatataaaaattaggttgggtatggtggtttatgtttgtaattttagtattttgggaggttgaggtgggtagattatgaggttaggagtttaagattagtttgattaatgtggtgaaatgttatttttattaaaaatatgaaaattagttggtgtggtggtatttgtttgtaattttagttatttaggaggttgaggtagaattgtttgaatttgggaggtagaggttgtagtgagttaagattgtgttattgtattttagtttgggtgatagagtaagattttattttaaaaaaaaaaaaaattagttgggtatggtggtgggtatttgaaattttagttatttgggagtttgaggtaggagaattgtttgaatttaggaggtagaagttgtattgagttgggattatattattgtattttagtttgggtaatagagtgagattttattttaaaaaaagaaaaagaaaaaggataaatatattttaattaaataatgtttattttatgattgtagttgatttaatatttaaaaattggtttggtgtagtagtttaggtttgtaattttaatattttaggaggttgaggtaggaagattttttgagtttaggattttaagattagtttgggtaatatagttagattggtttttattggggggaaaaaaattagtttgtgtaatttattatattaataaagggaaatataaaaattttatgattattttaatagatgtagtaaaagtagttaatgatattaatatatatgtatgattataaattaattaattttttagtaaattagggaaaggaaatttaattagtttgataatagggtgtttatagttggagttttattagtagtatatataatggtagaaaatttagtgttgttgggggtggtggtttatgtttgtaatgttagtgttttgggaggtttaggtgggtggattatgaggttaggagattgagattgttttgattagtatgttgaaattttgtttttattaaaaatataaaaataaaaaattagttgggtatggtggtgggtgtttatagtgttagttatttgggaggttgaggtgagagaatggtgtgaatttgggaggtggagtttgtagagtttagattgtgttattgtattttagtttgggtgatagagtgagattttgttttaaaaaaaaaaaaaaaaaaaaaagaaaagaaaatttaatgtttttttttttaagattaggaattagaaaaggatttgatttttataatgttgatattatattggaggttttaattaggtaagaaaaagaaataatgagggttgggtgtggtggtttaggtttgtaattttagtattttgggaagttgagatgggtggattatgaggttaggagattgagttattttggttaatatggtgaaattttgtttttattaaatatataaaaaattagttgggtgtggtggtgggtgtttgtagttttagttatttgggaggttgaggtaggagaatggtgtgaatttagggggtggagtttgtagtgagttgagattgagttattgtattttagtttgggtgatagagtaagattgtgttttaaaaaaaaaaaaagaaaaagaaataatgattagtggtttgatgttttatgttagtaattttagtattttgggaggttgaggtgggtagattatttgaggtttggagttggagattagtttgataaagatggtgaaattttgtttttattaaaatattaaaaaaatagttaggtgttggttgggtatagtggtttatgtttgtaattttagtattttgggaggttgaggtgggtggattatttgaggttaggagtttaatattagtttggttaatatggtgaaattttatttttattaaaaatataaaattagttgggtgtagtggtgggtgtttgtaattttagttatttgggaggtttaggtaggagaattgtttgaatttgggaggtggaggttgtagtgagttgagattgtattattgtattttagtttgggtgataaaagtaaaaattttgttttaaaaaaaaaagaattagttaggggtagtggtgaatgtttgtagttttagttatttaggaggtagaggtaggagaattatttgaattttggaggtagaggttgtagtgagttgagattgttttattgtattttagtttaggtgagaagagtaaaattttatgttaaaaaaaaaaaaaaaaaaggaaagaaaaaaaataatgattagaaaggaagaaattaaatatatttatagttagtatgattttatatatattatggttttaatggggttaggtgtggtggtttatgttgtaattttagtatttttaggaggttgaggtaggtggtttttttgggattagttggttaatatggtgaaattttaattttaataaaaatataaaaaattagttaggtgtggtgagggtatttttaattttagttatttaggaggttgaggtaggagaattgtttggatttgggaggtagaggttgtagtgagttgagattgtgttattgtattttagtttgggtaataagagtgaaattttggtagggtgtggttttatgtttgtaattttagtattttgggaggttgagttaggttgattatttgaggttaggagtttgagattaatttaatatggtgaaattttgtttttattaaaaatataagaattagttgggtgtagtggtgggtgtttgtaattttagttatttgggaggttgagatagaagaattgtttgaatttaggaggtggaggttgtagtgagttgagattatgttattgtatattatgttgggtaatagagtgagattttgttttaaaaaaaaaaaaaagatgaaattttattttaaaaaaaaaaaaaagttttaatggaaaatttataaaaagttattaaaattaataaataaatatagtagggttgtaggttatagggtaatatagttatttttttatttgtaggggtttggttttgggattttttatatattaaatttatagatgtttaagttttatatataagatggaatagtatttaatttatatatatttttttatatagtttaaattatttagattatttatattatttttatataatgaaaatgttaatgtatatgtaagtatgtatgtaagtatttgtattatattgtttagggaattattggatagataggtttttaagattgatattagtagttattgttaagattttggttaggtttgtttttgtttggggttttagttgattttattgtttttttatttagttaagggtatttgtattttttttggttttttggttatttggaaggtttagtttagtttggtatatttgtattttggtttattgatgttggtatttttgggaaggttttgttttgaaaaatatggagattttagttgttattgaagatttgagagataaagatagggagatttgtttgtagatttgtgtttttttaagtgggattgagattttgggttttttattttaggatagtattttttggtttgttgattgaatagatttttgaaggaggtgtagttgtattttaggagtgggggtgggagtagtattattgatttgtattaataattatatagttttttttagaataataatatagaataagtgaaatagaataattgtagaaagagttaatttttgttgagtttttattgtgtgtttagtattttttttaattttatattttttataatatatagagtattaggtaggtggggtttgggggtttatgtttgtaattttagtattttaggaggttaaggggggtggattatttgaggttgggagtttaagattagtttgattaatatggtgaaattttgtttttattagaagtataaaattagttaggtgtggtggtatatgtttgtagttttagttatttagtaggttgaggtaggagaattatttgaatttgggaggaggttgtagtaagtggagatagtgttattgtattttagtttgggtaataagagttgagattttgttttaaaataaaataaaataaaataaaataaaataaaataaaataaaaaaagaaaagagtttgttattaaaggagttgtttggtaggggatgttttgttagtgtaaataatagaaaagtgggttgggtatagtggtttatgtttgtaattttagtattttgggaggttaaggtgggtggattatttgaagttgggagtttaagattagtttgattaatatggagaaattttgtttttattaaaaatataaaattagttgggtgtagtggttgatgtttgtaattttagttatttgggaggttgaggtaggagaattgtttgaatttgggaggtagaggttgtggtgagttgagattgtattattgtattttagtttggatgagagtaaaattttgttttaaaaaaaaaaaaaaatagaaaagtgtaataaatatttatagtaggtatgttttttagtaaatttgatgataaatttggtataaagaaagagagtatttttgaaaaaaaaaaaaagaaaaagaaagagagtattttgtttgggtaatatagtgaaattttgtttttataaaaaaatttaaaaattggttgggtgtagtggtttatatttgtaattttagtattttgggagttggaggtgggaggattatttgaggttaggagtttgaaattagtttggttaatatggtaaaattttatttttattaaaaatataaaaaattaattaggtgtattggtgggtgtttgtaattttagttatttaggaagttgaggtaagaggattgtttgatattgggaggtggaggttatagtgagttgagattatattattgtattttagtttgggtgatagggtgagattttgtttttaaaaaaaaaaagaaaaagaaaaagattaaaaaattagttaggtaggtttttgtggttttagttatttgggaggttgaggtaggagaattattgagtttaggagtggtaggttgtagtgagttatgattgtattattgtattttagtttgggttttaaagtaagattttgttttaaaagaaaaaagaaagaaagaaagaatatggtgggttaggtatagtggtttatatttgtaattttagtgttttgagaggttgaggtaggtggattataaggttaggagttttatattagtttggttaatatggtgaaattttgtttttattaaaaatataaaaaattagtaggtagggtggtaggggtttgtaattttagttatttgggaggttgaggtaggagaattgtttgaaattagaaggtagaggttgtagtgagtttagattgtattattgtattttagtttgggtgaaaagagttaaattttattttaaaaaataaataaaaaaataaaataaaaaaaaatatggtagtttttgaaagtttgtttgggagaaggtgtgatgatggttgtataattttgtgtaagatgttggtttatataggggttgttttttgtttttttttgtttttttaattttttatataataggtttgtgtgttatgtatatttattgagtttaagtaggtgtaaggtattgtgatttaatattttggttagtaagataataagatagattattgttttgtttttaggaagtgtatatgttattagaggaaatagataaaataaataaggaaaagtattagataatgtaagtgttatgagaatgtaaatgaggtgatgtgaattaaaataggatgatttaagtttgtatggaaggtttttatttttatgtttttggttagttaaggaattattagttgattagtagagaagggtagtttgtttagttagagtttttggggaagagggagtggttgttaagagatgagattaaagaagttgagatgggttttttgtgagggggggttgtaatgtagggttgaggagtgtttgaagagaatgggtaggtgagtggtgagatagttgtttttttagaagttttgtagtgaaaggaattaaagaaatggagttgtgtattaggtggggaagggtgggggttaagggggtgtttttttttatatagagattgtaggttgagaatgattatatttttgttaataggaggtgggagtagggtatggtagtttatatttgtaattttggtattttaggaggtggaggtgggttgattatttgaagtaaggagtttgagattagtttggttaatatgtaaagttttgtttttattaaaaatataaaaattagttgggtgtggtggtatttgtttgtaattttagttatttgggagattgaggtaggagaatggtttgaatttggaaggtagaggttgtagtgagttgagattatgttattgtgttttagtttaggtgatagagagagattttattttaaaaaaaaaaaaaaatataggaagggagttgggaatagggtgtatatttaggaagttttggggatttagtggtgggaaggttggaagtttttttttgattgttttttttttaaagaagtgtatggttggtgtggggtggggtaggagtgtttgggttgtggtgaaatattggaagagagaatgtgaagtagttattttttttttgttttataggaagttgagttgttttagatattggtatggtgttgggggagggggttttttttttgtaggtttaggtgatttagggttggaagtgttttatgttggatttttatttttttttttgtagt

SEQ ID NO: 350 - DNA, 15863 bp, Artificial Sequence
  chemically treated genomic DNA (Homo sapiens)
gttgtaagaggaaaagtggggatttagtatgagatatttttaattttgggttatttgggtttgtagagaaggaatttttttttttaatattatgttagtgtttgagatagtttggttttttgtggagtaggaaaagaatggttgttttatatttttttttttaatgttttattataatttaagtatttttgttttattttatattagttatgtatttttttgaggaaaagataattagagagggatttttaatttttttattattaaatttttaagattttttaaatgtgtattttatttttaattttttttttgtatttttttttttttttgagatggagtttttttttgttatttaggttggagtatagtggtatgattttagtttattgtaatttttattttttgggtttaagttatttttttgttttagttttttgagtagttgggattataggtgagtattattatatttagttaatttttgtatttttagtagagatagggttttgtatgttggttaggttggttttgaattttttattttaggtgattggtttgtttttgttttttaaagtgttaagattataggtgtgagttattgtgttttgtttttattttttgttaataaggatatagttatttttagtttgtaatttttgtatggggaaggatatttttttggtttttatttttttttatttgatatatggttttatttttttgattttttttattgtaaagtttttggaagaataattgttttattgtttatttgtttattttttttggatattttttagttttgtattataatttttttttatgaagggtttgttttggtttttttaattttattttttaataattatttttttttttttaaaagttttagttagatgggttgtttttttttgttaattaattggtggttttttggttagttaggaatatgggggtaggggttttttgtgtagatttaagttattttattttaatttatattattttatttgtatttttatagtatttatattgtttgatatttttttttgtttattttatttgttttttttaatagtatatatattttttaagggtagggtagtgatttattttgttgttttgttgattaaagtattagattataatgttttgtatttgtttgggtttaataaatgtgtataatatataagtttgttatatgagaggttaagagagtgagaaagagtaaggggtagtttttgtgtggattagtattttgtatgaagttatgtaattattattgtatttttttttagataagtttttaaaggttgttatgtttttttttgttttgtttttttgtttgttttttgagatggagtttggttttttttgtttaggttggagtgtagtggtgtagtttaggtttattgtaatttttgttttttggttttaagtaatttttttgttttagttttttgagtagttgggattataggtttttattattttgtttgttgattttttgtatttttagtagagatagggttttattatgttggttaggttggtgtggaatttttgattttgtgatttatttgttttggttttttaaagtgttgggattataggtgtgagttattgtgtttggtttgttatgttttttttttttttttttttttttttgaggtagggttttgttttgaagtttaagttagggtatagtggtgtaattatggtttattatagtttgttatttttgggtttagtgatttttttgttttagttttttaagtagttgggattatagaggtttgtttggttaattttttagtttttttttttttttttttttttttggagatggagttttgttttgttatttaggttagagtgtagtggtgtgattttgatttattgtaatttttattttttagtattaagtgatttttttgttttaattttttgagtagttgggattataggtgtttattaatgtgtttgattaattttttgtatttttagtagagatggggttttgttatgttggttaggttggttttgaatttttgattttaggtgatttttttgtttttgatttttaaagtgttgggattataggtgtgagttattgtatttggttaatttttgagtttttttgtagaggtagggttttattatgttgtttaggtaggatgtttttttttttttttttttttttttttttagggatgttttttttttttatgttaaatttgttattagatttgttaagaaatatgtttattgtaagtgtttgttatatttttttgtttttttttttttttgagatagagttttgtttttgtttaggttggagtgtaatggtgtgattttggtttattgtaatttttgttttttaggtttaagtgatttttttgttttagttttttgagtagttgggattataggtattggttattgtgtttggttaattttgtatttttagtagagatggggtttttttatattggttaggttggttttgaatttttaattttaggtgatttgtttgttttggttttttaaagtgttgggattataggtatgaattattgtgtttagtttatttttttgttgtttgtattgataaaatattttttattaaatagtttttttaatggtaggtttttttttttttttattttattttattttattttattttattttattttattttgagatggagttttagtttttattgtttaggttggagtatagtggtattatttttgtttattgtaatttttttttggatttaaatgatttttttgttttagtttgttgagtagttaggattataagtatgtgttattatatttggttaattttgtatttttagtagagatggggttttattatgttagttaggttggttttgaatttttgattttaggtgatttattttttttggttttttaaagtgttgggattataggtgtgagtttttaagttttgtttatttagtattttatgtattatgggaaatgtagagttgaggaaagtgttgggtatatagtaagagtttaataaaggttagttttttttgtaattgttttattttatttgttttatattattattttagagagaattgtgtgattgttagtgtggattagtggtattgtttttatttttatttttaaaatgtaattatattttttttagggatttatttagttaataggttaggaggtgttgttttgaaatggggggtttaaagttttaattttatttggagggatataggtttatagataggtttttttgtttttattttttaaatttttagtagtaattaaaatttttgtgttttttagagtaggatttttttaggggtattagtattagtgggttaggatataaatgtgttaggttgaattaggttttttaaatggttagggagttaagagaaatgtaggtgtttttggttgggtgggaaggtaatgagattaattgagattttaaataggggtaggtttgattagaattttaatagtggttgttggtattagttttgaaggtttatttgtttagtgattttttaaataatatagtataagtatttatatatatatttgtatgtatattagtatttttattgtatgggggtaatgtaagtaatttagataatttaaattatatgggaggatatgtgtaggttaaatattattttgttttatatatgggatttagatatttgtgggtttggtgtgtgaggagttttagaattaagtttttatagatagagggataattatattgttttgtaatttgtaattttgttatatttatttattagttttggtagttttttatggattttttattaggatttttttttttttttgagatagagttttattttttttttttttttgagatggaattttgttttgttgtttggtgtggtgtgtaatggtatgattttagtttattgtaatttttattttttgggtttaagtaatttttttgttttagttttttaagtagttgggattataggtgtttattattatatttagttaatttttgtatttttagtagagatggggttttattatgttaggttggttttaaatttttgattttaggtgattggtttggtttagttttttgaagtgttgggattataggtgtaagattatattttgttggagttttatttttgttgtttaggttggagtgtaatagtgtgattttggtttattgtaatttttgttttttaggtttaagtaatttttttgttttagttttttgagtagttgggattagaggtgtttttattatgtttggttgattttttgtatttttattagagttggggttttattatgttggttagttggttttagggaagttatttgttttagttttttaaaagtgttaggattatagtatgagttattatgtttggttttattaggattatggtatgtatagaattatattggttgtgaatgtgtttgatttttttttttttaattgttattttttttttttttttttttttttttttttttgatatggaattttgttttttttgtttaggttggagtgtaatgggataattttggtttattgtaatttttgtttttggggtttaagtgatttttttgtttttgttttttgagtagttgggattataggtgtttattattatttttggttaatttttttttttttgagatggagtttttgtttttgttatttaggttggagtgtaatggtgtaattttggtttattataatttttgttttttaggtttaagtgatttttttgtttaagttttttaagtagttgggattataggtgtttgttattatgtttggttaattttgtatttttagtagagatggggttttattatgttggttaggttggtgttgaatttttgattttaggtgatttatttattttggttttttaaagtgttggggttataggtatgagttattgtatttggttaatgtttggttatttttttaatattttaatagagatgaggttttattatttttgttaggttggtttttaattttagattttaggtgatttgtttattttggttttttaaagtgttgggattattggtgtgagatattgggttattaattattatttttttttttttttttttttttgagatatagttttgttttgttgtttaggttggagtgtagtggtttgattttagtttattgtaagttttgttttttgagtttatgttatttttttgttttagttttttgagtagttgggattataggtgtttgttattatgtttggttaattttttgtatatttagtagagatagggttttattgtgttagttaggatggtttgattttttgattttgtgatttatttgttttggttttttaaagtgttgggattataggtttgagttattgtatttggtttttattattttttttttttgtttggttaaaatttttagtatggtattaatgttgtgagagttaaatttttttttagtttttgattttagaggaaaaagtgttgagttttttttttttttttttttttttttttttttgagatgaagttttattttgttatttaggttggagtgtagtggtatgatttaggttttgtaagttttgttttttgggtttatgttatttttttgttttagttttttgagtagttggtattataggtgtttgttattatgtttggttaattttttgtttttgtatttttagtagagatggggttttagtatgttagttaggatagttttgattttttgattttgtgatttgtttgtttaggttttttaaagtgttggtattataggtgtgagttattgtttttagtagtattgagttttttattattatgtatgttgttagtggaattttgattgtggatgttttgttattaaattagttaagttttttttttttagtttgttaggaggttggttggtttgtaattatgtatatgtgttgatattattaattgtttttgttatatttgttgaaatgattatagggtttttatgtttttttttgttaatgtggtgaattatatagattgatttttttttttttagtaaagattagtttgattatgttgtttaggttggttttgaaattttgggtttaagagatttttttgttttagttttttaaaatgttgggattataggtttgagttattgtattaggttaatttttgaatgttgaattagttataattatgagataaatattatttggttagaatgtatttattttttttttttttttttttttgagatggagttttattttgttgtttaggttggagtgtaatggtgtgattttagtttagtgtaatttttgttttttgggtttaagtgatttttttgttttagatttttgagtagttgggattttaggtgtttattattatgtttagttaattttttttttttttgagatgaagttttgttttgttgtttaggttggagtgtagtggtatgattttggtttattgtaatttttgttttttgggtttaagtaattttgttttagttttttgagtagttgggattataggtaggtgttattatattggttgatttttgtatttttagtagagatggtgttttattatattggttaggttggttttgaatttttgattttgtgatttgtttattttggttttttaaagtgttgggattataggtgtgagttattgtgtttagtttgatttttgtatttttattagaaatggggttttattatgttggttaggttggttttaaatttttgattttaagtgatttgtttgttttagttttttaaagtgttgggattataggtgtgagttattgtgattggtttatttatttttttttttatattattaggtttggtttgttaaaattggttagttgttgtatgtttatgttaataggaatattggtttatattttttttttttataatgtttttgtttggttttggtattaggattattttggttttgaaaataagttgggaaatatttttttattttttttttttttttttttttttttgagatagggttttattttgttgtttaggttggagtgtagtggtgtaattttggtttattgtaatttttgttttttaggtttaagggatttttgtgttttagttttttgagtaattggtattataggtatggtgtatgtttagttatttttgtattttagtagagatggggttttgttgtgttggttaggttggttttgaatttttgattttaaatgattttttgttttagtgtattaaagtgttgagattataggtatgagttattgtgtttagtttgtttttttgttttttgaagagtttgtgtaagatgggtattgtttttttttttaatgtttaaagagagtagagaatagaggagataaatagaaaatagtattaagaggttaggtatggtggtttatatttgtaattttagtattttgggaggttgagatgggatgaaagtttgaggttagtagtttgagattagtttgggtaatatagtgagattttgttaatataaaaaaataaaatagttagttgggtgtggtggagtaattttagttatttgtgaggttgttagaggattgtttgagtttaggggtttgaggttgtagtaagttttgattgtgttattgtattttagtttgggtaatagtgtgagtttttgttttaaaaattaataaagaaaaaaagaaaatagtattaaaatggtagttttatattttaattgtaaaataattaaaattaaaagtatttagtagagaaaggaagtttattttaataagtggagatagaataattggatttttatataggaaagatattagagattgatttttatattttatattataaataattaattttaagaattaattaatggtttaaggattttattgtaaaatttattattataaaggttttaaaagaaaatgtaagattatatttttatgattttggggttaaaaaaaaaaaaaaagatgttttaaataggataaggtaaatattgaatataaaaaagattaatttattttttttaagattttgtaaattttgtaaagtaaataaataggtttgtaatagattagaagaaaatatttatgatttatggatttgataaggatttgtatttagaaagtataaagtagttttataattgaataataaaaataaataaaaaaattaaaataataggtaaaagatttgaagagttattttataaataaaatatgaatggttaataggtatatgaaaaaatgttgaatatttttagttaatagagaattgtaaattataattataaggatatattatattagaaagattgatatatttaatgtttggaaggttgtggtataattataataatttttatattttgttagttggagtgtaaaatggtataattgttttggaaaatttagagtttttgaaaaagtttaaaatatagttattttttattttttttataattttttttttaagtatttttttaagaaatatgaaaatatatgattataaaaagaattgtataagaatgtttatagtagttttattttataattgtaaatgggaaataatttaaaaggttattaaaaggatggatatataattgatggattatattaaatgaaaaggagtaaaatattgatatatataatatgaatgaatgttagatagtatattgaaggatagaagtttgataaaaatgagtatataatgtatgattttttttttttttttgagatggagttttgtttttgttgtttaggttggagtgtagtggtatgattttggtttattgtaatttttgttttttgggtttaagtgatttttttgttttatttttttgaatagttgggattataggtatttattatgtttagttaatttttgtattttttagtagagatggggatttattatgttggttatgttggtttggaatttttatttttaagtaatttgtttgttttggttttttaaagtgtaggtgtgagttaaagtgtaggtgtgagttatagtgtttattttgattttattttatatgaagttttttaataggtaaaatggttatggagattaaaataaaggtggggttgggaattgattgggaagagatgtgatgaaatgtttttgggatgatgaaaagggtttgtgatttggtaggtattatggagtggttaggggttaaaatttatttttttgtgtatttgttgtgtgtattggtgttgtgtgtaaatgttattttgatttaggaaaaagatgatgtaagtatggtataaagtggttggtatgtggtaggtgtatgggaagaaattgtggaatgaaataattgtgagttaagagatggggtagtgggagaaatgaatttgagttttgttttttattaggaagaattggtttgggttgagggttgtatggaggattatatggatgtttgtgggtttgttttttttgttttatgatgtttagtttgtgtttggaattggaatggtttagtttaaagttagataataggtagattgttttttttgataaattattaaatgatttattattgtatttttttaaaattttatttttagatgtattatttttttttttttttttttgggaagatgagatatgtttatttttgaaagtgtttttgggtttgttttttgtatatttttttttttttttgtttatgttatggtagtgtttgtttaggttgtaggtgatttggggggtggggtatattatttaaagaaggggagggattgaggtttgtattaaaataaatatttttgtttttgtaaaggttataattaagtaatttagaaaaagaaatgtaggtggagaatagtagtttttttttgttaagtaagaggaattggtttaaaggatatttttttttttttttttttttttttattgggtgaatagtgagttgttttggtaaaaagaaattggaaatgttgttgtaagaggtagaaatgtaaatgtggagttaaataataatagggttgttgggttttttagattgtgatggttttttttggtttggtgggtaaatttttggtttagtattttttatttttatgattgatagtttttaattggattttttttatttagtggagttgggggttgtttggaaagattgttttaggaaggataaaggtttggaagttgtgggattttagtagtttgggttttttggattatttttaaatgattattttggaatggagttttagtttttattaggatgttatgggttttaaaatatatagttatgagtttttaatgttttgagatttaaaagttttagattttaatgttttgtgtattttttattttagggattttttatgtttagtattgggtggatgtgtaaagaagtatgttttaggttggtttaaggttttttaaagttttatttttttgtttaggtgtttaattttgagtttggatggttttaatatttttattatttatatttaggttttttaataatgtaatttttatgatgatttttttagttaagtttttattttatttatttttaaatttgttaagtttttattgttttatttttagttttagtgatttttttgagttgaaaatatatggagttgagagtttgtgatttagagaggatttattaagtttagttaggagtttatttaatttagggaagtgtgttattgttgtggaaagtatgtttttagtttgaatgtaaagtgtttttggagtttagtagttatttgttttttggatggtggttttagatttttgagaagtttaaaatttttagtgttagttttgagtatatgggaggggaaaattttaattttattaatttttgtgaggtttttggtataaagttggatagttgttatgataagtaagggtaagtaatttgtttgttggaggaagtaaaggaaatggagttggggaggagggtgtagagttaggatttttgttgatttggtgttgtagatattaatattttggggtggaaaattttgtaagttagagttgtgagggtagaattggtggaaattattttggaggaattttgtattgtgttaaatatgaagggtggaaggaagaaagtttttgtgtttgtttttagttggattttttttttttattagttaaaatgttattttttaggaaggttttttgtaatattatattttaatgtttttttttagatattttatattatattattttatttaattttttttataatttttattattttgataagatttatttgtttattgtttttagtatatggaaatgtaagttttatgaggatatagaatttttttattattttatttattgttgtatttttgagtgtttatattagtgttgggtagtaagtaagagtttgataataaatattttttgaatgagggagataggtttgaagtttggagaatgagatgtagaagaggtgtaagatttgttgtgttttttgtaggtggtgggggggtggtgtaggtgttttaagaattattgtgggatttggtagggggagtgtaggtgttttttgttaagatagaagtgtttagattataatttttagtagttatgaggagttttagggtttgatgggaatgggaaattttttaattttttatgttttggttttgtgggttttgtgggttgtttgtgaaatttgatttgggatgtggtggtttaattggaaggtggattgaaattttgtgatagtaagaggtttgtagtgatttgtggtgttaaggaatatagtgtttttaaaagaattggtgtttgttgtttgtttttttttttgggagttttttgtttatttttagaagaggagggaagtataggtgggtttttttagttttgtgttggatttttgagaattttgaagttattttggttgaggttaatttttgttgtgttttttttgtagtatgaagattttggagatttaattgttagttttggattgttgttttttagattaggatttagttttagtttatttttttttttatgtttttttgatgaataaaaatgtggattttgaattgatgttattgttttttgaaaggggggatttgttttggttgtttttagattttgtggttggtttagttgtgttttaggagttatgggagggggatttagtttttttttttatttttttggaaatagagtttggtttttttagtgagttgagtttttgaattgaggagtaagaattttttgaaaatataagtttttttgtagaagaagtaaatgggagtttttttgaagaagaagtgaatgggttagagttggggtttggaaaagttatggaagatatttttggggaatttgttgtagaggatgagggagatatgtaagtggtgatggtagtggagtgtggagtttggggagatgaagtgtgaggttgatttgttttttggttttgagatttatttttttaggtttttgttttttttgtttggtgatttaggtttattgttttttattttttttttagtgtttggaattatagttttttttagttgttttgattttttagtggtttttggttagagtttagtatttaatttgagaattttttgaaaggttgtaagtggtaaggataataatggggtagggagttgattatttttgagatttttattgtaaaatagtttagttttttaggagagggatgttttagagttgggagaagtggtatgtagtttttttagattgagtttatattttatttagtagtttgtgttttttattttttttaaggatttaggggggtttatttattttagaggtaggtttagttttagttttatatttgaaaagtataggtttggttagttttttaatttttttttgtttttagggtttttgatggtttttgtattttgattaatagtgttgataatattttgtgaatttataatttgtttttagagttgtattatgagggggagtaggtggaatatgtagaaatggtaaggattggggttaattgtttttttattaatgttgtatatttaagttttttgtggagatggaaaaagtgtagtttaagtgttttttgtttataaatgggattgttttttaagatgagtttttatatgtagtgttttttgttttgaattttgaagttatttagagagaggttttttttttttttaattaggaatttgtgttttttgttaaaaagtagtgaattttttgtggtagtatatatatatttttattttttatttttttgagataaggttttgttttgttatttaggttggagtgttgtggtgtgattttggtttattgtaatttttgttttttgggtttaagtgatttttttgttttagttttataagtagttggtattataggtgtatgttattatatttgattaatttttatagttttagtagagatggggttttgttatgttgggtaggttgatattaaatttttgattttagaggatttgtttattttggttttttaaagtgtggggattataggtgtgagttattgtgtttggtttatagttatttattgattgattattgatatatgttagttattgtgttgggataaagtggtggataagatagatgaagggttggtttgttttttgtgtgggagatagataataaatatgtaaattagtaagtattaggattaagatgatgataaatgttttgaaggaaatatatagaatgaagagagattaattagaggaaagtatattgtataaaatggttaggaaggagttttttgaaaaggaggtatttgagttaagatttgaaggaggataagggattagttatgtgaaggtttttggaaagagttttttaggaattggtaatgatattataaatatttagaattgggaaatagttttgtgtgttaaaagattagaaaggttttgtatggtggtttatgtttgtaattttagttatttaggaggttgaggtgtgtagattatttgaggttaggagtttgagattagtttggttaatatggtaaaattttattgttattaaaaatattaaaattagatgtatgtggtggtatgtgtttgtaattttagttatttgtgtggttgaggtaggagaattttttaaatttaggaggtggaggttgtagttagataaaattgtattattgtattttagtttgggtgatagagtgagattttattttaaaaaataataaaatagattgggtttagtggtttatatttgtaattttagtattttgggaggttgaggtgggtagattatttgaggttaagagtttgagattagtttggttaatatggtaaaattttatttttataaaaatataaaaattagttgggtgtgatggtgggtgtttgtaattttagttatttgagaggttgaagtagaagaattatttgaatttaggagatggaggttgtagtgagttaagattatgttattgtattttagtttgggtgatagagtgagattttattttaaaataaataaataaataaataaataaataaataaatataaaataaaaaatttagaatgttggtatagttagattgaggtaagtgagggggatagaggggtgaggatagagaagagtagttatgttgtgttggtttttatgggtaaggtatttggagtttatttgggaagttatgagagaggtgttttttttttttttttgagatagagttttgttttgttatttagttggagtgtagtggtgttattttagtttattgtaagttttgttttttgggattatgttatttttttgttttagttttttttgagtagttgggattataggtgtttgttattatgtttggttaattttttgtatttttagtagagatggggttttattatggttttgattttttgattttgtgatttttttgttttggttttttaaagtgttgggattataagtatgagttttgtgtttagttttttttgggttattttttaaatttgttttattgtattttttagtagtatgagttattgtttttatttttttgtgttggagtatttaggtatttagggttttgttgggttttttttttttttattagtatttttttttttttgtattgttttttgagatggtgataatgattgttaaatttttaatttttgagagtggtttattgaggttgtgattatgatattaatgattatagtattaggatattttaaaagatatattttgtaatatagatagttaatttgtgttttttttggttttttttggggggggggggttttgagatagagttttgttttgtggtttaggttggagagtagtggtgtgattttgttttattgtaatttttgtgttttggtttaagtgattttgttgttttagttttttgagtagttgggattataggtatgtattattgtatttggttaattggggtatttggagtagagatggggttttgttaagttggttaggttggttttaaatttttgattttaagtgatttatttatttgtgttttttaaagtgttgggattataggtgtgagtattgtttttggttagtgagtttgtgtttaaaagatttttgtggttggtgtggtggtttatgtttataattttagtattttgggagattaaggtgggaggatgtttgagtttaggagtttgagattagttttggtaatatagttagattttgtttttattaaaaaagttgggtttatggttttagttatttgggaggttgaggtgggaggattgtttgagtttgtgaggttgaggtt

SEQ ID NO: 351 - DNA, 6077 bp, Artificial Sequence
  chemically treated genomic DNA (Homo sapiens)
aaaatatgagaaagtaagtatttgatattttttattttaaaagaggggggtttttggaatgttattgttttggtttttagtgattgtggtttttttttttgttagaggttttatgtttagattattagtgatatttttagtttttaaagattagtttagtttatataagggtaatgttgaaatatataagttaggttttaatattgttatattttattgtaaagtataaaagtatgttttaatttgttatttaaagttttaagatatttttaagtttttttttatttgtatgttaaaaattaaatttaaatgggaagtagtattgggagaaagtttttttgtgaattaataattaaaattttttgttagttttataaatatttttggataatttttttaaatttataaagggtaagaattgaggttttatagatgataatgaaaatggtaaggaatgtattaatttttttatgtagtgttgaatttagagttaaaataatagaagattaaaagataggtttttatttttgtatatataaagatgttttgtaaatgtttatttatttttattaatttatttttaatatgaaatgggaaatgtttaagtgttagtattatttttttaaagatagtttttttttgtttatatttgtttattatgtttttatttaagtaaataattttaagtaaaaataatgtttgagtatttatttgttgaatgtatattttattatagttttaagattaagaattgatgtttaaatattaattgttttgttagttttatttattaaggttaaagtagtttgtgttttatgaattgatattaaaaaagaaagttatgttagttttttgtgggagaaaagagagataggtgggtgatggtagattggaataaggagttattatagtatttatttttttatattgtagttttgaaaattgtgattagttatagtgaattttttatgaaatggaatatttttattaatattttgaggaattatataaattttattgtaagatatgaaaattagaaatatggatttgttttttttagtttttagggtttttaagaagatgattttagtaatagattattattaagtgttttagggtattttgattagagtgtataagttggaaaaaaatatttaagttaagtaagtagatgtaatttttttttttataatttattgaaatttttataaatggtaaaaataaaaaataaattttttatttaattgaggaggggggtatattgaaaatatattaaggttgagatgttatttaaattaatgaggttttttgttttgtagttgatgttattttatgtgatttggaataaaatttttttgaagaggtaaaaaatgtaatttgagagttaaatttttaaaagttagatagagtataggaatgttaggagtggtaaaatttgaaaaagtattatgatatattagttagttagtataggtggtggataaggaaaatgaagtttattttttatgaggtatgtttttttttagtggttttttaatgttaattgttttttttttttgaggatatatatattaggtatttgggttattttttttttttgaggatatatattattaggtatttaggtatatatattatatgttttgaagtttaaagttatagttttgtgatttaagtatttttttgttatttatggaatgaagattttaaattttagttatgaggataattatttttttatttggggatagaatattagtatttaaattatttatttggtatgtggtagaggagaagagaattagaggagaagtagagatgataaagtagttatattatttattagtttataggtaatagaattattaatttgttttttgtgataaagtaataataaagagttgatattttttatatttttatttgtgtgtagttggtattgttgatatttatttttttaagggtatttttttagattttttatttgtttatggtatttttttgggttttgtatttgtttgggtatttgttggggttttgtatttgtttggtttttatatttgtttggggtatttgtttgggttttgtatttgtttggggtatttgtttgggttttgtatttgtttggggtatttttttgggttttttatttgtttagggtatttttttgggttttgtatttgtttggggtatttgtttagatattgtatttgttttgggtatttgtttgggttttgtatttgtttgggtattgtatttgtaggatttttaagttgtttttatttatgtggttgtttttggttttgtttgttggggatgttggtattgaggatgttttgtttgtggtttaggtttttgttgtttattaggtatttgttgtttggggagaatttgtagagtaagttggagagtttgaatattttggagaagtttatggttgttgtttgttgtgggtgttattttgtgtttgaaaatttgtgggatttttgggtgtgtagtaggttgtaatagttgatgttggtttttgaggttggaagttagaaggtggaagtgaattgtagtttattagtgttgttggtttttgtgtggtattgtggggtttgtagtttttgtgttgtagggttttaaaggaaatgtttatgttttttttgattagggatttttgatttgagaattttattttaaaggttgggaggtttttgagtatttttagttagggttgttgataaaaatgtagaaagtatagtaaaatttgaattttagatttataataaatttagttataagtatgtttttaaatattgtatgggatatgttaatatggaaaaattatttgttagtttgaaatttaaatttaattgagtgatttgtgtgtttgtgtgtgtgtatatatgtatatatatatatttatatttatatgtaaatgtatgtttatatgtaaatatatgtttatttataaatatatttttaataagtaatatggtgtttgttgtatatatattatattgtgtatgtaatgtataagtatttattttgtttgtttggggttttgtttgtttttgttgagtttgatttttttatttgttgtttggtttttgttttatgttttagtgttattgagattaaggagagaatgaatttgttgttgattgggtagagtgagtgtgtggattgtggttattgtttgtttattatttgtgtgtatttgggttggtattgggtgaagaattgtgtgggtttgggatttgggggtttagagggagtgagtttttgtgtgggtgtttggtttgtaggttttgtaggtttaggggtgtgttttgtttttatttttattttggattttggtttttttttttagatagtggttttttttatttttggtttttgtaggttgttagtagtttgtgttaggttttgttggtgtttttagggttttttagattgtgtagattttgatatttttgtttggttttgggttttgggagttgagagttggttagggttttgtttgtatttttgggtgtttagttttgggtttgttttttgtggatgttttaatttttttggttgaatggatggtggtgtgtgtgtgttttattttggtggtgttggttttttttgttgttaaaattagatttaaatttttgtatgggatttgtttttgggtttttattttgtgtgtttagtaaatagtgggtgagttatgaagatgtgtgagttagttggattttttttgttaggtgtggatttgttgtggttagagaatttagtttgtgttagtttggtttgtttgtgaagttatgggttttattgatgtgattttttaagatgtgggggttattatgggtagaggatattggtttggagttagattatgggttttataagtattagattataagtagtgttgttattgagagttgtttggaatttgtttagtatgttgggttttttagttagggtttggtgtatgtggttgagggttttggaagttttgatggtttaggaggagtaggtgggtggggtggtgggtgttgttggttggtagagagttttggtttgatttagtgtaggtttggtgtgtgtagagaataattttaagtgtattgatgtttgtgagttttttttaaatattgaatgggatttagagtttgagtttataggtggtggttgggggagggagtagggtgttggttgttgtttgggagtgtttgtgttttgggtgatttttggaaggatgtggggtttaaattttggttggggttgggagagtagtttttagaggttttttgtgggattttttgttgggtgggattgtggttttataggagaagtgggtggtaagttttgtttggtggaaagtagttgtttttttttttttgggtttggggtggtgttttttatttttgttttttgttttttatttttgttttttgttggttatattttttgttttttggattttaagtgttttgtgtgttgaggagtttagtgttagtggtggtggttaggagagatttgggtgttaggaaagatgggttgtttgggggatagtagggagtttgggggaaatgtaggtgttgggtatagagttggtattggtgtttttagttttgttgaagattgtggttgggtttggtttgtgggaggggttttggtgttggatttgttttggttttgtgtgggtggttttgttgggttttgtaggagtgatgtgtgttaaaaggtggtgggaaggaggtggggtagagtgtgtttgggattttgatttggatgtggttagttggagaggtggagtgttgggaggagattttggttttgttgtgatttggtggtttgtgttgtttttttgtgtgttgggttaaaaaggtgttaatgtttgtggttgtttattttttgtggtgttttttttttttgtgtttatataatttgtttaggggttgggtagtttgttttgtttttttgtttgtgtatttgtttggaggtttgtgtgtttgtgaaggggatgtagtgaaattggggtttgtgttaggttagttgggatggatgttgatgtttggggttgtgatggttgtaggtaggaggtttagggttggggggtggtttggttttgtgggtgggggttggagtgtagtgttgggtaggtatttgggtttgtagttttgaagttgggaggtgaggggagagtgattggggatgagttgggataaggtgatataggggtttttttggagttggattggtttttgggatttggtgtttgtgagaggttggagtggttagagtttagtttgtgaggagatgtgggttttgtttttagtgttggttgtttttggtgttaaagatagttttgtaggggttttgggagggttttttttttgttgttttttttttattttgggttttgagggttgttgggagggtaattttgggaagaggttggggtgtggggtgtgggtgtaggtggaaattgttagtaagtttttttttgtttgtgtgttttttttgatttgtagggttgtgttaattttgaggttttagtttttttgaggagttagggttaggtttttttttggatagggagaaggatttgggtgggggttttgatttatggagttggttattaagtggttttgatggttttttgagggatagttttttgtggttttgagtttgtttgttgagggtttttggtttgtttttggagtggttttaggtagagaaagtttgtgaagaaatggtttgggttggtttggagggagatattttatgtttttttagtttttgggttgtttttttttgtagtttttgttttttttggggtttggatttggggagtgatgattatttttgtttagtttgtattttggtttggatgttaggagataagtttatgtagtatgtatatgtttgttatataaataggggatagatagatgatttttaattagtaagggtgtagggaaaagtaatgtattttaaatttttgattagaggttatttgtttttaaagatgttgttatttgtttatttattgtttggatatttggaaatggtttaggtttattaatataatg

SEQ ID NO: 352 - DNA, 6077 bp, Artificial Sequence
  chemically treated genomic DNA (Homo sapiens)
tattgtgttaatgagtttgagttatttttaaatgtttagatagtgaataaatagatggtagtatttttggaagtaaatgatttttggttagaagtttggggtgtattgtttttttttgtatttttgttggttgaagattgtttatttgttttttgtttatgtagtagatgtgtgtatattatatgggtttattttttagtgtttaggttaaaatataagttgagtaaaggtaattattgttttttaagtttaagttttgggaaaggtaggggttgtaggaggaggtggtttaggagttaagggggtgtgaggtgtttttttttaggttggtttgggttatttttttatgggttttttttatttgggattgttttggagataggttaggagtttttgatagataaatttagagttatagggagttgttttttgggaaattattgaaattgtttagtaattaattttatgggttaaggtttttgtttagatttttttttttgtttagaggggggtttggttttggttttttagggaagttgaggttttgggattggtatagttttgtaggttggagggagtgtgtgggtggggaggagtttgttggtgatttttatttgtatttgtgttttgtattttggtttttttttggggttatttttttaatggtttttggagtttggggtggagaggggatagtaggaggagggtttttttggaatttttgtggggttgtttttggtgttaaaggtggttggtgttgagggtaggatttgtgtttttttgtaggttagattttggttgttttagttttttgtgagtgttaagttttaggggttgatttaattttgagggagtttttgtgttgttttgttttagtttgtttttgattgttttttttttattttttagttttggagttgtgagtttaggtgtttgtttagtgttgtgttttagtttttgtttgtggagttgaattgttttttggttttgggttttttatttgtagttgttgtagttttgggtattggtgtttgttttggttggtttggtgtgggttttggttttgttgtgttttttttgtgggtgtgtgagtttttgggtgggtgtgtgggtggggaggtagggtgggttgtttggtttttaggtgggttatatgggtgtggggaggggaggtgttgtggggagtaggtggttgtgggtgttagtgtttttttagtttggtgtgtgggaaggtagtgtgggttattgagttgtggtggggttaaggtttttttttggtgttttgtttttttagttggttgtgtttaagttggggttttgggtgtgttttgttttgttttttttttgttgttttttggtgtgtgttgtttttgtagagtttggtgaggttgtttatgtagggttgaagtaggtttggtgttagggttttttttgtgggttagatttgattgtgatttttggtagagttggggatgttggtgttgattttgtgtttgatgtttgtgttttttttggattttttgttgttttttagatggtttattttttttgatatttgggttttttttggttgttgttattagtgttgggttttttggtgtgtggggtgtttggaatttaaggggtaggggatgtggttggtggggaataggggtgaggggtggggaataggggtgaggggtgttgttttaggtttaggaggaggggaatggttgttttttgttaagtagggtttgttatttattttttttgtggagttatggttttgtttggtagaggattttgtggagagtttttgggggttgtttttttaattttagttggagtttgggttttatgtttttttaggggttatttaggatgtgaatatttttgggtggtggttagtattttgtttttttttttggttgttgtttgtgggtttgggttttggattttgtttggtgtttggaaggagtttgtgggtgttggtgtgtttggagttgttttttgtgtgtattagatttgtgttaggttaggttgaagttttttattggttagtgatatttgttgttttgtttgtttgttttttttaggttattggggtttttagggtttttgattatgtatattaggttttggttaggggatttgatatgttgggtgagttttgagtggtttttagtggtggtgttgtttatggtttgatgtttatggggtttgtgatttggttttgaattgatgttttttgtttatggtgatttttatgttttggaaagttgtgttagtgaagtttgtggttttgtgagtgagttgggttggtgtagattgggttttttggttgtagtgggtttgtgtttgatggggagggtttggttgatttgtatatttttatggtttatttattgtttgttgggtgtatggggtggggatttaaagatgaattttatgtagaggtttgggtttagttttggtaatagaaaaggttggtattgttggagtaggatgtgtgtgtattattatttatttggttggggaggttggggtgtttgtggggagtagatttgaggttgggtgtttggaggtatgagtaggattttggttggtttttagtttttagaatttagggttaggtggggatgttagggtttgtgtgatttggggggttttagaggtgttggtggggtttggtgtggattattagtggtttgtgggagttaggggtggagggggttgttgtttagggaagaggattggggtttggagtgggggtgagaatgaggtatgtttttgagtttgtgaaatttgtggattgagtgtttgtgtaggagtttgttttttttgggtttttaggttttagatttgtatgattttttgtttggtgttagtttagatgtgtgtgggtgatgaatgggtggtggttgtgatttatgtgtttgttttgtttagttagtggtaaatttgttttttttttgattttagtggtattggagtgtgaggtaagggttaggtggtaggtagaggggttggatttagtaaaagtaaataaaattttaagtaaatgaaataaatatttatatattatatatatgatataatatatgtgtgatagatattgtattatttattaaagatatatttgtaggtaaatatatatttatatgtaaatatatatttatatataaatataaatatatatatatgtatgtgtatatatatgtagatatataggttgtttaattaaatttgaattttagattagtgagtaatttttttgtattagtatgttttgtgtaatatttgggaatatatttataattagatttgttgtgaatttgaaatttaaattttattgtgttttttatatttttattagtagttttagttggaggtgtttaaaggttttttggtttttgaggtaaggtttttgggttggaaatttttggttggaagaaatgtgggtgttttttttaaagttttgtggtataagaattataagttttataatgttgtgtggaagttggtggtgttgataggttgtagtttatttttgttttttgatttttggttttggaggttggtgttggttgttgtagtttgttgtgtgtttaggggttttgtgggtttttgggtgtagggtggtgtttgtggtaggtggtggttatgaatttttttgaggtatttaagttttttagtttattttgtaagttttttttggatggtaagtatttggtgagtggtggggatttgggttatgggtaggatatttttggtgttagtgtttttggtgggtagggttgggggtggttgtgtgggtggaggtagtttggggattttgtaggtgtggtgtttggataggtgtggggtttgggtaggtatttggggtaggtgtagtgtttgagtaagtgttttagataggtgtgggatttaggaagatattttagataggtggagggtttggggaggtgttttaagtaggtgtggggtttaggtaggtattttaagtaggtgtggggtttaggtaggtattttaagtagatatgggggttggataggtgtaggattttggtaggtgtttgggtaggtgtgggatttaggaagatattgtagataggtggggggtttggggaggtgtttttggaaaggtgggtattggtagtgttgattgtatataggtgagggtataggagatgttggttttttgttgttattttgttataaaaggtaaattgatgattttgttgtttgtaaattggtaagtggtgtggttattttgttatttttattttttttttaattttttttttttttattatatgttgaataaatgatttaaatattagtattttatttttaggtaaggaagtagttgtttttatggttgggatttgaggtttttgttttatgggtggtagaagggtgtttaaattatagagttataattttaagttttaaaatatatagtgtatgtatttggatgtttagtagtgtatatttttagaagagagggataatttggatgtttagtatgtatgtttttagaagagggggataattggtattggaaagttattaagaagaaatatgttttgtaaaaagtgggttttgttttttttatttattatttgtattaattgattgatgtattatgatgtttttttaggttttgttatttttgatatttttgtgttttgtttagtttttgagagtttaatttttaaattatgttttttatttttttagggaggttttattttaaattatataaaatagtattagttataaaatagaaaattttattagtttaaatggtattttagttttggtatatttttaatgtgtttttttttttaattaaatgagaggtttgttttttgtttttattatttatgaaaattttagtgaattataaggagaaagattatatttgtttgtttaatttgggtgtttttttttagtttgtatattttggttaaaatattttgaaatatttggtaatgatttgttattggaattatttttttgaaagttttgaggattggggagagtaggtttatgtttttagtttttatattttgtagtagagtttatgtggttttttaaggtgttggtaaaaatattttattttataaggaatttattgtaattgattatagtttttaaagttatagtgtgagaaagtaagtgttgtggtagttttttgttttaatttgttgttatttgtttgtttttttttttttttatggaaaattaatgtggtttttttttttgatattggtttataaaatataaattattttgattttgataagtaaaattaatgaagtagttaatatttaaatattagtttttgattttgaaattgtagtaaaatatatatttagtaggtgagtatttaggtgttatttttatttgaaattgtttgtttggatagggatataatgaataaatatggataagaagaaattatttttaagaaaatagtattaatatttaaatattttttgttttgtgttaggaataggttaatggagataaatgagtatttgtgaagtatttttatgtgtgtagaagtgaaagtttgttttttgattttttgttgttttggttttgagtttggtattgtataagaagattgatgtattttttgttatttttgttgttatttgtgaagttttaatttttattttttataaatttgaggaaattgtttaaaagtgtttataaaattagtagaggattttggttattagtttatagaagagtttttttttaatgttattttttatttaagtttagtttttaatatatagataagaagggatttaaaaatgttttaaagttttaagtagtgagttaaaatatatttttatattttataatagagtatagtaatattaaaatttggtttgtatattttaatattatttttgtatgaattgaattgatttttaggggttggggatgttattggtgatttagatatgaaatttttggtaggagagaaggttatagttattgaaggttagggtagtagtattttgaaggttttttttttttggagtggagaatgttaggtgtttgtttttttatatttt

SEQ ID NO: 353 - DNA, 2501 bp, Artificial Sequence
  chemically treated genomic DNA (Homo sapiens)
agttgggattataggtgtatgttattatgtttggttaatttttttattttttatagagataggattttgttatgttgtttaggttggttttaatttttgaatttaagtgatttatttgttttgggtttttaaaattttgggattataggtgtatagtgttaggtttttatatttttatatatttttttgtttttttagttgtgaaatggagataatgatatagttttaatttatgtgggatgtttagtatagtgtttggtatttgatagatttttttttttttatttgaaatttatttttgagttgggtatggtggtttatatttgtaattttagtatttgggaaaattaaggtaggtagattatttgaggtgaggagtttaagattagtttggtaaatatggtgaaattttgtttttattaaaagtataaaaattatttgggtgtggtggtatatatttgtaattttagttattttagaggttgaggtatgataattatttgaatttggtagatggaggttgtagttgagttgagattgagttattgtattttagtttgggtgataaagtgagattgtttaaaaaaaaattatttttaatttaatataaaattttttgaatttttttttttttgagttgtttttttatttgagtttattttatattattgaatagttaattatagaattgtgtattattttttttgatttttagatttttagttttttatagtattttgtttttttttgttgtattagttatagttgtattttttttttttttttttttgagatagagttttattttgttatttaggttgtagtgtagtagtataattttagtttattgtaatttttgttttttgggtttaagtaatttttttgttttagttttttaagtagttgggattatatgtgtgtattattatgttaggttaatttttgtatttttagtagagatgaggttttattatgttgttaggttggtttagaatttttgattttgtgattagtttattttagttttttaaagtattgggattataggtatgagttattgtatttggttatagttgttattttatttgtgtgattgattattgtatgatgtttttattgaagtgtagtgaaggtaggaaatatgattggtttttataatatttttaatatttattattataggtggtatatagtagggttttaataaatatttgtaaaatgaataaagttaatgagtgtttatgtttgtagttttaattgttttgaagtaaatatttgattttttaatttttattagagtgttttgtatatagtaggtttaattatttttttttttttattaattatttatgttttgtaagaatttagttagttgattttttgtattttataagtgtgatgattgggtgtttttgtgtgagatgtgttatttttgaattttgttatgatgttggtatattgtgtgtttgatatgaagaaaaaaaaaatttagttagtttattaggtatagtggttaaggtttgtaatttttgtattttgagaggttaaggtaggaggattatttgaatttaggagtttgagattagtttaggtaatatagtgagattttgttttaaataataaataaaaataattagttgggtatggtggtgtgtgtttatagtattaattatttgggaggttgaggtgagatgattgtttgagttagggaggttaaggttgtagtgagttaagtttgtgttattgtattttagtttgggtgatagagtgagattttgttttaaaaaaaaaaaaaatattaaattttagaggggtgaaaaaaaattttatagtggaaatatagtaatgagttggtttagttttgtttttgttataatggtttatggtgttggaggatttttttgtgtatgtgtatagtttttggttggttatttttgtgagtgtgttttattttttattgagtgtgtgtgaagattatggaggttgatttgggagtgtgtatgtagttttgttttgtgtttgatttgtggattttgtggtgtttggtttgggtggtttggattgtggagggaatgttttggagggtggagaattgggatgaggttgaggtaggtgtggaggaggtaggtgttgaagagtatggttttgaagaagatggtggggaggagttgggtgttgaggagtttggtttggaagagtttggtttggaggaattgggtgttgaggaggagatggaggttgggtggttgtggtttgtgttgtgtttggtgaatttgtgtgagtttttttaggttattttttgtaattgtagtttgtgtgttgtgttgtttgtatggtttaattttgatggtgagttgtagttttatttaatgttgttgtttggtatgggttgttgtatttatagttattgaggtatgggtttggtgtttaggtttgatttagtagggatgatagtatggtttgaagtttttttattgttttggggtttattttgtagatgg

SEQ ID NO: 354 - DNA, 2501 bp, Artificial Sequence
  chemically treated genomic DNA (Homo sapiens)
ttgtttgtaaaatggattttggggtggtagaggggttttagattgtgttattgtttttgttgggttgggtttaagtgttgggtttgtattttggtagttgtggatgtggtggtttgtgttaggtggtagtgttgggtagggttgtggtttgttgttgaagttgagttatatgggtagtatgatgtgtggattgtgattgtagaagatgatttgggagggtttgtgtgagtttattgagtgtagtatgggttgtggttgtttggtttttattttttttttggtgtttagtttttttgggttggatttttttgggttggattttttggtgtttgatttttttttgttgttttttttagggttgtattttttgatgtttgttttttttgtgtttattttggttttgttttagttttttgttttttggggtattttttttgtgatttagattatttgggttggatgttgtgggatttgtgggttggatgtggggtggagttgtgtgtgtgtttttgagttgatttttgtagtttttgtgtgtgtttggtagaggatggaatgtgtttgtggaaatagttggttggaggttgtgtgtgtgtgtagaaggattttttagtattgtaggttgttgtaatggaggtgaggttaggttaatttgttattgtatttttattataaaatttttttttgtttttttaaggtttggtgttttttttttttttgagatagggttttattttgttgtttgggttggagtgtagtggtgtgagtttggtttattgtagttttgatttttttggtttaagtgattgttttgttttagttttttgagtagttggtattgtaggtgtgtattattatgtttgattaattatttttatttgttgtttgaaatggagttttgttatgttgtttaggttggttttgaatttttgggtttaagtgatttttttgttttggttttttaaagtgtagggattataggttttagttattgtgtttggtggattaattgaattttttttttttttatgttagatgtgtaatgtgttgatgttgtaataaggtttgagggtggtgtattttatatgggaatatttaattattatgtttataaagtataaaaagttaattaattgaatttttataaggtatgggtgattagtaaagagggaaaaataattagatttattatgtgtagagtattttggtggaaattggaaaattagatatttattttagagtaattaaaattataaatataaatatttattaattttgtttattttataaatatttattaaggttttattatgtattatttatggtgataagtgttgaaaatattgtaaaaattggttatgttttttgtttttattgtattttaataaaagtgttatatggtaattaattatataaataaaatagtaattatggttgggtgtagtggtttatgtttgtaattttagtattttgggaggttgaagtgggttgattataaggttaggagttttagattagtttgataatatggtgaaattttgtttttattaaaaatataaaaattagtttggtgtggtggtgtgtgtatgtaattttagttatttaggaggttgaggtaggagaattgtttgaatttgggaggtggaggttgtagtgagttgagattgtgttattgtattgtagtttgggtgatagaatgagattttgttttaaaaaaaaaaaaaaaaaaagtgtaattgtgattagtatgataaaaagagatagggtattatagaaggttaaagatttgggggttaaggaagatggtatataattttgtgattaattgtttaatgatgtgggatggatttaagtggagaagtagtttagaaaaagaagggtttagagagttttatattaggttaaaaataatttttttttagatagttttgttttattatttaggttggagtgtagtggtttagttttagtttagttgtaatttttatttgttgagtttaagtgattattgtgttttagtttttggagtagttgggattataggtgtgtgttattatatttaggtaatttttgtatttttagtagagatggggttttattatgtttgttaggttggttttgaattttttattttaggtaatttgtttgttttggtttttttaagtgttgggattataggtgtgagttattgtgtttagtttaaaaataaattttaagtagaaagaaaaaaatttattaagtgttagatattgtgttaagtattttatgtgaattaaggttatgttattatttttattttatagttaaggaaatagaagggtatataagaatgtgaaggtttagtattatatgtttgtaattttgagattttgggagtttaaggtaggtggattatttgagtttaggagttggaattagtttgggtaatatagtgaggttttgtttttataaaaaatgaaagaattagttaggtatagtggtgtgtatttgtagttttagtt

SEQ ID NO: 355 - DNA, 2401 bp, Artificial Sequence
  chemically treated genomic DNA (Homo sapiens)
ttattaaagaaaaaaaagatgatttattagatagttgttaaggtatttatataaaattatatgatagtaggatagatggtaattaagagggaatttaggatttgttattattagttggaaatatttgatttttagtttgtaaatgtgataagttagattaatattagtaggatattgaatatagtttgtagggatgagtttttgtgttatttttggatatgtgtttaagtaattagaataatttaaaatgttattaggtttttgttgttatttttataaattttgaatagtgagttgggtttttaaggaatttgtttttgttagtttattttatgttgtataataaataggtttaaagtttttggtagtgtatattaagtatggaggattttttatttattatgatagtttttttgttggagggttggggttgtattttatttttttttttggaaggggtggtttttgtttgaggttttatttgttttatagtagagggatgaaatggtaggattttggttttgatgggttttatttggtaatggtatatgttaagtgggttatgttttattgtttagagtaagttatatggttatgtttgatattgatgtgtgggaaatgtagaatttttttgtatttggggaggtagatatttggataatatgtaatttattatagggttagttggatgaagaatggttaagggtttaggttttttattttgagttaggttgaattagttggggttgtgagattaagttatggttattagtgtttgtttggaattatgttttgtttttgttgtgtttatattgtagtagggtttttgttttttaatttatttgaaattggtggtgggtgtggtatatagatgagaaataggaattttttatgttgggttttaataggagttgtggtgggaatataaatggtgtagttattttggaagatagtttggtggttttttataaaattaaatgtattttttatatatgatttgttatatattatttagtaattgtattttttggtatttgtttagatgagttaaaaatttgtatttatataaaaatttgtatgtggatgttgatagtagttttatttataattgtttaaatttggaagtttttaggaggtgagtgggtaaataaattgtggtgtttttggttagtggaatattatttagtgttaaaaagaaatgagtttaagttatggaaagatatgaaagaattttaagtattattaagttaaagaagttaatttgaaaaggttgatgttgtatgagtttatatttatgatattatagaaaaggtaaaattataaagatagtaaaaggattagtggttgtaggagttagggaggagggagggatgaataggtggggtatagaggatttttagggtagtgaaattattttgtatgatattgtaatggtggatataggatagtaagtatttgttttttattttgtagaatgtatggtattgagaatggatttttttgtaatatatggatttttagttataatattgaattttttttggggttttgtattgtttgtagtgttttttaatttttgtttttgttttgtttattgttttttttttttgttatagtgtgtttgttttgtggttgttaattagttgtgtgttttggttgtgtgttttgttttgtttttggtgggtgtgtgtgtggttaatgggtggtgtgtgggggttgggttgtggtggggtggggtagtggggtggttgttaattgttgtggtgttgttgaaattgaaaatattatattatgttaattgtggttgggtttgtgtgtatgggggtggggtttgtgtgtataaagggggtgtaggtgggttgggtgttttataggttaagtgtgttgtgtttgaggggtgttggttaggtttgagtgagtgagttagttagtaggtattgagggggtgtggttgttgtttggatgagataggtgaatttgatgtagaagagtttattattggatagttaggtagttgttgtgttttttgtatatgtagagttgggtggtgtggggttttttttgtgtttggtttttgtttttttttttttttttttttttttttttttgttgttttttttttttttgttgtttgtgtttgtgtagttttgggttatgtttgatgtgtttttttgtagtatatttatgatggagtgttttgttgtttgtgggatttttttagtattagtgtgtattagtgtttgttgtagtttttttgggttggtggattatgaggagttgagttgtgagttgtaggtttgtttggttgagttgaatgttgaggattagaattgttgggattatgatttttagtaggatatgttgttgtggggttttggatgtttgtagtggattgaagtgg

SEQ ID NO: 356 - DNA, 2401 bp, Artificial Sequence
  chemically treated genomic DNA (Homo sapiens)
ttattttggtttattgtaggtgtttagggttttgtagtggtatgttttgttggaagttgtaattttagtggttttggtttttggtgtttagtttggttaggtgggtttgtagtttgtggtttagttttttgtggtttattggtttgaagaggttgtggtaggtgttggtgtgtattagtattgggaaggttttatgggtgataagatgttttattgtggatgtgttgtggagggatgtgttggatatggtttggggttgtgtaaatgtgggtagtgagagaggagaggatagtgagaagaaggggaaaggagaggaggagagggtggaggttgggtgtaagggagattttgtgttgtttgattttgtgtgtgtgagggatgtggtggttatttggttgtttggtggtggatttttttgtgttgggtttgtttgttttgtttggatggtagttgtgtttttttgatgtttgttggttagtttgtttgtttaggtttggttggtattttttgagtatagtgtatttggtttgtggaatgtttagtttgtttgtgttttttttatatgtgtgggttttatttttgtgtgtgtgggtttggttgtgattagtataatgtagtatttttagttttaataatattatggtgattggtggttgttttgttgttttgttttgttgtggtttggtttttgtgtattgtttattggttgtgtgtatatttattgggggtggggtggggtgtgtggttggggtgtgtggttgattggtggttgtggggtgagtgtgttgtagtaggggaagggggtggtgagtggggtgggggtgggagttaaagggtgttgtgggtggtatggaattttgaaagggatttaatattataattgaaagtttatatgttataggagggtttgtttttagtgttgtatattttatgggataaaggataaatgtttattgttttgtgtttattattatagtattatataaggtagttttattgttttaaaaattttttgtgttttatttatttattttttttttttttttagtttttgtaattattgatttttttattgtttttgtagttttgttttttttataatgttatagatgtgaatttatatagtattagtttttttagattggtttttttgatttaataatatttaaggtttttttatgtttttttatgatttgagtttatttttttttagtattgaataatattttgttgattggaggtattatagtttgtttatttatttattttttgaaggtttttaggtttgggtaattatgaataaagttgttattaatatttatgtgtaagtttttgtgtggatgtaagtttttgatttatttgggtaaatattaaggggtataattgttggatggtgtgtggtggattatatgtgaagggtatatttagttttgtaaggagttattaaattattttttaaagtggttgtattatttgtgtttttattgtagtttttgttaaagtttagtgtggagagtttttgttttttatttgtgtattatatttattattaattttagatgaattaaaaaatagaaattttattataatgtggatatggtaaggataaggtataattttaaatgaatattgatgattgtggtttgattttatggttttggttggtttggtttggtttggggtgaagagtttgggtttttggttgttttttatttagttggttttgtaatgaattgtatgttgtttaaatatttgtttttttaaatgtaggaagattttgtattttttgtatgttaatattagatgtggttatgtaatttgttttgggtagtgaaatgtgatttatttggtatgtattattgttaaatggagtttgttaaagttagggttttgttgttttatttttttgttgtgagataaatgagattttagataggggttgttttttttaaaagagaaaatggagtataattttagttttttagtgaagggattgttgtggtgagtgagagattttttatgtttgatgtatgttgttaagagttttgggtttgtttgttatgtagtataaggtaagttgatagagataggttttttgaagatttaatttattgtttgaggtttatgggaatgatagtaagggtttggtggtattttgagttgttttggttatttggatatatgtttagaaatgatgtagagatttatttttgtaagttgtgtttagtgttttgttggtgttggtttagtttgttatatttgtaggttggaggttaggtgtttttagttggtagtgatgggttttgagtttttttttggttattatttattttgttattgtgtagttttatgtgagtgttttaataattgtttagtaagttattttttttttttttgatga

SEQ ID NO: 357 - DNA, 1508 bp, Artificial Sequence
  chemically treated genomic DNA (Homo sapiens)
attttataattataaatatttagtgtattttgtaaatatggtataatttgttggtataaaattttattgttttagaaaatattggtaataaaattatagaaaagttaaagatttttattttttattttgaagtgtttgggagatattttagaaatggatgggaaatgttaaattttgtatgtttgtttatttttttttttatattgattagatgtaaatgagtgttattaaaagtatattataggtatttatatagattttttttataagggatttataaagtttagatgtgaaatgtattttaaagggtttttagttgttttttatttttttttttgtgaaatagggaagatatatgtgtttttaagggtagagatggaatttgggttaatgggttggggggtggggggaagttggaagggattgttttaggatatggtaggatagtggattgtttttgttgttttgttgtttatattggggttttttgtaggtgtgttggttttttttttttttgttgagaagaagttttgttaaaatatttgttttttttgggaatttttttgtgggtttaaagtgggaaaatgttgttttaggtttaaaataatttgtttaagttttttagtgtgggagaaatgtttttatttgttttttgtttttgggggtgttttttgttttttgttgttagaattttggggagtgtttagatttggggtagtatatgtttgggttaattgtgagtagaataaatttttggtgggtggttaggaagtttttttttagttattgtttttttttagtgtttttttttttttttatataatataagattttttttttttagtttttttaaagtatagtttaaggaaatttttttatagtttttatttagttatgggttagtatgtttgggggtaaatatgtagatttggaggtaggtatttgtgggggggtgttggtttgggtgtgtggggaagtgtttgtttttgttatttgtttttttaaatattttgattgttgatttggttttttagttttttttttattttggagtatttttttggtgttggtattgttgaagaatgggtttgggtggggaggtgaagagaagttaggaatgttttatgtttttttaatggagagggggttttgggagtttttgagttaggaggatatggaaaaggggattggggttttgagattgggtttgttgggtttaagatgtgttttttggatgggtttaggatgtttttttgttgtgggaattttgtggtttggttttgtttgttgggggtttgaaaaagtggattgtagggtggaaggtgttatttatttgagttttggggatagtttttgggattttttgttaagtgtttaaaatggtaggtttttaagtggtgtgtggtgtttttgtattttttaaaatttttgaaatattttaaaaatttttttgtattttggtgtttggtagggttttttaaaaaaagtaaattttttttttaaatgta

SEQ ID NO: 358 - DNA, 1508 bp, Artificial Sequence
  chemically treated genomic DNA (Homo sapiens)
tgtatttgggagggaggtttattttttttggaaaattttgttagatgttaagatgtagaaggatttttgagatgttttaagaattttggaaagtgtaaaaatattgtgtgttgtttggggatttgttgttttgggtgtttggtggagagttttggggattgtttttaggatttgggtaaataatattttttattttgtaatttatttttttgaatttttagtaggtagggttggattgtggggtttttgtgataggggagtattttagatttatttagaaaatgtgttttgggtttaatagatttaattttaggattttaatttttttttttgtgtttttttagtttaggggtttttgaggttttttttttattaggaaaatataaaatatttttggtttttttttatttttttgtttaggtttattttttagtggtgttaatgttagaggagtgttttgaagtggaaagagggttggggggttagattagtagttgggatatttggagaggtagatagtagaagtggatatttttttgtatgtttgagttggtgtttttttatggatgtttatttttgagtttatgtatttgtttttagatatgttggtttgtggttggatgaaaattgtgaggaggtttttttgggttgtgttttaagggaattgaggaaggaagattttgtattgtatggggggaaaaaaaggtattggaggggggtggtggttgggagggagttttttggttgtttattaaaggtttgttttgtttgtggttggtttggatgtgtgttgttttgggtttaggtattttttaaggttttggtagtagagggtggggagtatttttgggggtagagagtgagtaagaatgttttttttgtgttggggggtttggatagattattttaaatttgaggtaatatttttttgttttgaatttatgggggggtttttgggggaggtggatgttttggtagggtttttttttagtagggggggagggagttgatgtgtttgtagagagttttggtatgggtaataaggtggtagaaataatttattattttgttatgttttaaggtagttttttttaatttttttttattttttggtttattggtttaagttttatttttgtttttgaaaatatatgtgttttttttgttttatagagggagggatgagagatggttaggaattttttagggtatattttatatttaaattttgtggattttttatggaaggaatttgtgtgggtgtttgtggtgtatttttggtgatatttgtttatatttagttggtgtggaaagaaaaataagtaggtatgtagaatttaatattttttatttgtttttgaaatgttttttaaatgttttgaaataagaaatgaagatttttaatttttttataattttattattgatattttttggaataatggaattttatgttaataggttatgttatatttgtaaaatatattaaatgtttataattgtagaat

SEQ ID NO: 359 - DNA, 1984 bp, Artificial Sequence
  chemically treated genomic DNA (Homo sapiens)
  unsure (9, 17, 18, 33, 41, 49, 50, 52, 54, 62, 80, 84, 127, 157, 159): unknown base
  unsure (175, 207..209, 214, 1181): unknown base
agttttagntattattnntatttttattaatgnttttgggnttataggnngngnttttttgnttaaatagtagttaatgnaggnattttaaaaggtatattattttatatttatttagtggttatgntattatttaatttttattataattttgtgngnttagtataatttgtgnttttattttatttgtgaataaatggaggtagnnntttgngtaatttataagtaagtggtagatttgggggttgtgtttagataatgtggttttagattttttgtttttttttgttttttgttgtattttgattgagtttagttatttatttttttaatatatattaattgttgtttttatgttttaggttttgtgttagatgttagaaatatatttttatttattggattttggtatggtttattgtttagtgttttgttatgttatgtgttatataatgtatttattttggtatttagtttatggaaaataatgttgaaagatattgtatgtatgtttttataataaaattatgtaatttatgttttttttattgttttggttattaggaagtttttatttaaattagagtaaatatattagaatttgggtttgttattttagtttgttgaatttttttttttggtttagattttttattttggtttataaattttattgtataaatgttttttattgtaaaatattttaaattttttttaagggaaggttgtatggaaatgatatagtaaggttttttttgtatttttttagatttttattagggaaggtagatttagatgttttttttatttttagttttaaagttttttatttataaaattttttaagtagtgattattgttgttttgagtatttggaggtagtttagagtttttgaaaggtaaaatttatatataaaaagaagttttttttgatttagattttagttttggtgttagatgtatatttgaggagtaggtggttagttagatttttatttgagtagttaataaaatttattgttttttaatggaattttttttgtaagtttgaattgatttgttatttttgtgatttgtgagatggtagggaagtattaaatattattatgatttgggttatagtggtgggaaaaaaggaaaaaagaaaaaaaaaatttattgttaagttttgttaggtgtanaaagggttggaattgttggggttattttatttgatttattggaaatagagtggattttattaatattttaataaagagaatttttttgtattaggttggaagtggttgttagttttttgtgtaattttattttttggaaaagtggaattagttggtattgtttagtgtgatttgtgaggttgagttttaatagtttaaagaagtaaatgggatgttatttttgtggggtttgttttttgtgaggtgtttattttgtatttgttatgtaaaatgagggagtgttaggaaggaatttgttttgtaaagttattggttttggttattagtttttatttaatgtttttgtgatgttgttgttgatttatttgggaagttggttggttggtgaggtagagtttttttttaaagtttggtttttatggaaaatatgtttagtgtagttgtgtgtatgaatgaaaatgttgttgggtgtttttagttggataaaatgtagttgagaattttgtttgttttgtgtgtttttttgttttaggtagggaagaggggttgttgggtgtgttttgtgttttgtttttgtatttggattgtttggtatgggtagggtgagggggtttttggggggttggggtttttggttgtggtggtgaagatagattggggtttggtagggaggttattttgagtttagagattttaggtattttttatatataggtttttattttggtgtgtgtgtgtgtgtgtgtgtgtgtgtgtgtgtgtgtgtgtgtgtgtgtgtgtgtgtatgtttgttaatgggagga

SEQ ID NO: 360 - DNA, 1984 bp, Artificial Sequence
  chemically treated genomic DNA (Homo sapiens)
  unsure (804, 1771, 1776..1778, 1810, 1826, 1828, 1858, 1901, 1905): unknown base
  unsure (1923, 1931, 1933, 1935, 1936, 1944, 1952, 1967, 1968, 1976): unknown base
tttttttgttaatgaatgtatatatatatatatatatatatatatatatatatatatatatatatatgtatgtatgttagagtgggagtttgtgtgtggggggtgtttaggatttttgggtttggaatgatttttttattgagttttgatttgtttttgttgttgtgattggaggttttgattttttgaaagtttttttattttgtttgtgttgggtgatttgaatgtagaaatggggtgtagagtgtgtttggtagttttttttttttatttgggataggagaatgtatagaatgagtggagtttttggttgtattttgtttgattagaagtgtttggtggtgtttttatttatgtatgtggttgtattgagtatattttttgtgggagttaggttttgaggagaggttttgttttgttagttagttaattttttaaatagattagtagtagtattatgaaagtattgggtagaggttgatgattaggattaatggttttataagatggatttttttttaatgtttttttgttttgtatggtagatatggggtgagtattttgtgaggagtgagttttgtggaggtggtattttatttgtttttttggattgttggggtttagttttataaattatgttgggtaatgttagttgattttatttttttagagaatggaattgtatgggggattggtggttatttttagtttagtgtaaaaagattttttttattaaaatgttaataagatttattttatttttaataaattagataaaatggttttagtagttttagttttttntatgtttggtaaggtttggtagtggattttttttttttttttttttttttttttattattgtggtttaagttatgatggtgtttggtgtttttttgttattttataaattataaagatgatagattaatttgagtttgtagaaaaaattttattaaggggtaatagattttattaattgtttaggtgagagtttgattagttatttattttttaaatgtgtatttggtattaaagttgggatttggattggaaggaatttttttttgtatatggattttattttttagaagttttgaattatttttaggtatttagaatagtagtagttattgtttaagggattttataaatggggggttttgggattgagggtaagagggatatttaggtttgttttttttaataggaatttaagaaaatgtagggaagattttattgtattatttttatgtagtttttttttagaaagaatttaaggtgttttataataaaggatatttgtgtaatagaatttatgaattaaaatagaaaatttgggttagaaggaaaagtttagtaaattgaaatgataagtttaaattttaatgtatttgttttgatttggataagagttttttgatagttaaagtaataaaagaaatataagttatatagttttgttgtagaaatatgtatataatgttttttagtattattttttatgggttaaatattggaataaatgtattatgtaatatgtaatatagtaggatattgagtaatggattatgttaagatttagtggatggggatgtatttttagtatttggtatagggtttggaatatggagatagtaattagtgtgtgttaaagaaatagatggttagatttaattaagatgtagtagaaggtagggaggggtaaggagtttggagttatattgtttaggtatagtttttggatttgttatttatttgtaaattatntaaannnttgtttttatttgtttatagataaaatgaaantataaattgtattgantntataaggttgtggtgaggattaagtgatgntataattattgaataaatataaagtgatgtgttttttaagatntttntattggttgttgtttggntagaaggntntnntttgtggntttaaggntattgataaagatgnnagtgatgnttgaagtt

SEQ ID NO: 361 - DNA, 17897 bp, Artificial Sequence
  chemically treated genomic DNA (Homo sapiens)
atattgtataattttttatttatgtttaaagtaaaggatttattatatattttgaatatagtttattttttatttttatttggaattgttttttttttatggttttttttttttttaatttttattgtttataatatgatattataggttaggtatgtttgtagataattgggataatttatttttatttaagtaaaaattttagatggtagtttttttatttgggattatgaagtaggtaggattttttttttttttttaatagagtttaagtagtaagattgaataagatgggatgaatttaaagagaaatatttgtatttgtttagttttttaattaatatttattgaatttttttatggttaggtgtgtaagatgttaggagggatgagataagatgatgatgatgatgatgatgatgatgatgatggtgatgatgatagtgaggatgagggtgaatattttaatgagagttttttatatgttagggattgttttaggtattttatatatattaatatatatatttattataatgattttgtattgttatgtgtattttatatatgaggaggtagaggaaggaaatgaaataatttgtttaagagtatagagtttgtaagtggtaaagataagatagaaataattttttaagagtagagagtggtgatttttggggatagggaagtggaaaagtggggagataaaggttgttgttttttttaataagttttgaagatttatttgattaggtttaagaaaaatttgataattattataaagtaaaaggaagaggagatgaggtgggtttttgggtatagatgtttgttttggaaagtttagggaggaaggggtgagaggaattgggttgtagtataggaatgggggatttgggaattagaggggattggttagggtgggttattgattgtagtgaatgtttatttgttgattgggttgtagtataggagtggggggtttggaattaagaggggattggtttagggtgggttattgattgtagtgaatatttatttgttgattagtttgatttagaagaaagggagagatggatgttggaggagagagggggttttgagggagtttaggattggaggtgggaagatatttttatggatatttttttattttgatagatagaaaagatgatggtttgtagtagtagatttataaattgtgattgaaaggtttgatggttttttttatttgttttttttatgtatagagaggtggagtaatttgttttaggtattatagtttataagtggtgaagttggagttgggggttatagattattgggtttttttttatgaatttttgttgtattttggttttttttaattttgagtatttatgagttttaagaaagatagttgggaataggtgatttttatggttatttttggaatatttggttagaatattttagtataaaatttaagttgttgttaagtagaaatttttagtggatattagtttagaaaatttaattttattttgtgatggatttgtagtgtgtgtgtatttattaagtaaatttgattttattgttgattagtgagaaagaggaataatgtaaatagttagtgtaattgtatttatatttagttttgtgagtttttgttattttagttggttgtggtgggggatgtggaggtgtatgtagtttttaggttttagtgaggggtttttgtatagggtgggtgttttttatgttttatgtgtatttaggtttgtattaaagatagttttttttttgtagtgtgatatttagttaagaaaattattttatttggtgtttagtggaagaaaatattttttttaatagggaaggaaaattggttgtgttgggttgagggaggggagtgtggaatttaaatggtgttttttttaggttttttttaaggtgatgtggattttgattttagaatgttattatttggaaaattgtgttttattgtttaaatttttgttttttttttttgtttttttttttttattttatttttttttttttgttttttgatttatttaatgttaatggttttttagaaggttaggttttttatataagtttagttttttgttaggtaatttttttggggttttaagttgtaaatttgggttgttttttgtattttgttttgaggatttttttaaagagataggtaagggttttttttggtaaaatgtttttttaattttatgtattagttttatttgttattgaagaagtgggttgttttttttgtgtttttgaatttgatattttttattttgatattttgtatttttgaatttgatatttttgtatttttagtaggtaaaaaattaaaggtgtttatttaataaattgttgtaatggggagtttatgggaaaatgggtatgtgtaagttggttaaaggataataggtatataggttgtttgatttgggagggtttttagatagtaggatggtttttagagatgtatttttgttgttgttgttgtttatgattatgtttttagggtttagaatggtgtttgggtatagtaggtttttaatatagttagggaatgaatgagtttattttaattatgttgtatggatggagaaattgtgttttggggttgtattatgttatgtatttgtagaaaatgtttttgtttttttagtttttttttagtggtggagtataggatttagtttataagagtagtttaattttgttatttgtggaatgatagaataaataagttttagggtttagggaggtaaggtttttgttttagttttttaagtagttggaattatagttgtatgttattaagtttatttgattttttatttttttgtagagatgatgttttattatgttgtttagatttttttggaatttttgggtttaagtaatttttttatttttgtttttgaagtagttgggattataggtatttgttattaggtttggttagtttttattttttttgtagagatgggatattattatgttgtgaaggttggttttaaatttttggatttaagagaggtttttgtattggttttttaaagtgttgggattataggtgtaagttattttatttggatataatattttatttgaaataagaaaaatttttttttattgggaatgttgtagttgaattagtttaaatttataaagaatggaagattgtttagtggttatttatttatttattaattttagatgttaaattttttagggtgggggaatgtgtttttatatttaaggtatttttgaatgtagttaaattttgtagtttagttaaattttatagttaatagttaaattttgtagtttagttaaatttttttagtagtaaaatttatgatattggaattttgttttttatattggttatttgtaatagaataatagagttttagtattagataggttttgaaagattattgaatttaattttttttttttgttagtgagaattttgaagtttagatttgttgatttgtgattgatagtgttaaagataggtttgaaatatagatgttttgggttttagaggtgttgtttgtttttttttatattttttttgttttagaaaatttttttttaaaattggttttaataattagaggggaaagttatggtttttgttttggggatagtatgggttggtatagaaaagaggtttataatttagtaggaagtgttgtgtgtgtgtgtgtgtgtgtttgtggaggtgtagggagggttatttgagtttgttttgggtttggttttgggtttagtggtaaatttaatgttgggtaggtggtttgaggataatgatggtgttagttgtgagttagattttttttatttataaaattatgtttttttatgtagtgttttttaatttggttgtatgttaggagttatttgggtagttttgtaaaaattttaatgtttagttggtttgtattttttgagattttgattaaattgttttggagtttatttttttttttttattatttatttatttatttattttttaatttggtggtttttttgggattttttatatgtagtaggggttgagaattgttggtttttttggttagatgggaatatgtaggttaatagttatgtataaatagagtagtagagtaggatggtgttaaggttggaaagggtgagttatgaaagtttaggaaattagaataggaaggggtgagaatttttttatttgggtttgtggggtaggagagaagagtttagtgggtaaggtttagtgagtgtgtttagaattgggaagatgaggggaagggtaagtgttgggtggtggtgggtaagatggatgagattaaatgggagtgaggattttagtgagagttttggtgatatggaaggttgagaattggagggagtttgttgggtgaaagtgaaggtggttgttgggtaggtagttgaatttggttggagagttgagttggtgagatttataggaagtgaagggagttgtttagggtgtggtgtaatgagatttttagaagaaattttgaggtagagatggggggtttttgtttatatggagatataaggaagtttatatgtatatgtatgagtgtgtatatgaatatgtataagtatataaatgttttttttgggtagggtatatgtgtttgttgtataggttgaggttttggatttggaggggattgtagagttgatttataatttgggttttgatgttttttttggttgtgtttttatgattgtttgtgtaataggtggtggttttagtgggtgtttgttgtgtgttgttggagtttagtttagtttggtgtgtttgggaggagggagtagggagtggggaaggggtgtgttttggttgtgtgttgggattgtgagggtttgggaggggtgaggtgtgggggtggggttgtggtgtttataaagttgttttttgtttggatgtaaataaattttgtttggtttttagttggtgttgaagtttgttagtttattatttgtttttggtttttgtggggtgttgggttgttagttttggtattgttttttttttttttttttgtgttaggtaagtttgtgttttttttttttaggtgtgatgtggagtagaaaggggttgtttgtgtggtgttgttggagtgttaggattgttttttgtagttttgtgtattttaggagtaagtgttttggagttgtaagtgtgtggttattttggggtgtgggtgtgagggggttttgggtgtagatattgttgaagtggggggtttaattatggaaagggaggaaaaaaagatagggttttatttattttttttttagttggggattggggttttggaggttgggaagggggtgatgagatggtttgaaaaaatattaggatagtgttttttggtgttgtttttgaattttagttggtgttgttggtaggggtgtgtgttggatgtgggtgtagaagggattaggtgagtgtgtgtgtgtgtgtgtgtgtgtgtgtgtgtgtgtgtttgtgtttgggaatggagagattgtgtgtgagtgtgtagatgaggggttggtagaggtgagtggtgttggtaaggaggttggagaggggggtgtgggtgtgtttggtttgtagattgggttgggaatgggtgtggatttgagaggttggtggtgttttagttttgtagtatatatagggtggtgtgtatgtgtgagtgtaagtgtgtgtgtggggggagggtttagggtgtgttatagtgtaatatgtgagttggagtaagtgtttgtgagtgttattgggtagggtgtgtttttggaggaatttgggattggtgtattggtggtgtgggagaagtgatttgggtgagaggggttttgtggatatttggtggttttttgagttggttggagttaggagtggtgttatttttgtttttgtttatttttttttgtttttttttttttttttgtttttggtgttggttgtttttgttttttatgggggaaaatagttggaattattttgatgtttttgggggatttgttgtggtttttgatttagttttgggaggagattttgggttgggtttggggaatgtggttggttttgggggaaatatgttgttatgtttttgttaaattagtagttggagttgggatttagtgggttggttttttatttattttttttttatattttttgtttgttgtttttgttgtttttgggggttttgaatagtatgtttttgtggtttggaagtgggagatgtttggtagtgggtgggggaggtagggtttttggttattttatgtttatttaagaatattttttttttatggatgttgggggtattttagtttgtttggtttttttaagttattgggaaatatttaatatttagaagttagttagtggttaggtaggagggtggtagatatttttataatatttattagttgtatgggatttttttttaagttgttttaaaagaatatatttaaatataaattttttgtttttgttgtagaaatgtagttttaaggtgaattttttagtttagattttttttgttgagaaattttggtgtttttattgagttttataaatgtgattgaaataagtaaggtatagagggggtaaattttagtgttttttttggaagggttgttttttggtggggaagatatatggttggagatgtagattggttttgtgtggtgtgtgtggtggtagagttagttttaggttggggtggtatagtgttggggatgaaggaaggtgtaagggagagagagggttttggtgtggatggaaaattgggtgtttttttgatttgtgattttttagttttgtgggattgtgttttttattgtatttgggtaaggaggaggatttgtttgttttgttttgtaatttggtttttggtttagtgtttggtaggtgggaggagttgaaatatgtatatgggatgaagtggatggttttgggttttttgttttatttttttgtgaattagtaggttgagttttgggtgaggtaatagattgtgtatgggtggaggtgttggtttttgtttttgagggattttggagtgtttgtttgggttttttgtgaggaagtttttttggagtaataaagtttgattatttggaatggaataaaaaatttatataggatttatttagtttaatttttttttattttatagatggaaaatgaggtatagggatggggagggatgtgtttaggttgaattgagttggagtttagttttgtgagaggtttttgggtgggattgaaggtagtggaaagggtttttggtaggattttgtttgtttgttatggaggggtgaaaggaaattgtatttttattgaatttttggtgaggaaatttttgaggttaaaggggtagagtggaatgattttttttaagtgtaaattaggtgtttttgagagattagtaaagttagtttgaagggtaggggtttagaggttgtagttttttgagttggtttttgattgaatggggttgttttttttttatgatagaagatagattttaattgagttgagggtttttttgggttatgttgaaatttgttggtttgaatttgtttttttatggatttgaaagaaagatagtattgtgttttttgggtggtttaaagttgtagtttttttttgggatttaattttagagaattttattttagatgtgatttagaggttttgttttgggagagaaagtgtgatgatttagtatttgagatttaagtagggtttaggtttgatttagtttggaaggaaggttagggagggatatgatatttttttttttttagagtagttattgtttttttttatttgtttttatttttgtaagaatgttgtttggattgtattgttttattgaatggatgaggtaattgaggttaggagagttttaggatttgtttgttgttatatggtttaggtgggagagttagattttgaatttggatagttggattttagagtttttgttttttttttatgataatatgttggggtgtttgaagaaattaggtttaaatgaaaaggtagttaggagttttatgttttagtttgtttttttgtaaaatgagagtaatagatatgatgttattagaatgtgtaaatattaatttgtgtaatttgagaatagtattgagtatgtggaaaatagtgtgtaggtgtttgttgttagtagtatttgtagaagatatttttaaggtatttttttggtaggtagagtttgggattttttgttttaaatttatttaaggttgtgaaagtgtttgtaaatgtttgatttaggtattgttttttgttaagtttatgtaggttgtataatagtgttatgaaaattttgtttgaaatgtatatttttaggtttggttttttgtgattttttttttattaggggatatgttgttgttttaaagtttttttggttgggttgggaatggggtattttgtaggtagatagagttgagaatttttgttttggaatgataggggagagaagaaggaaggtgtagttatatatgttgttgtatttttaggttattttgtgtttatagtgttagggaattagtgagtgtttagtaaatagtttttgtttgttatagtgttttggaggtttaatgtattatattagttaattgaggtagaagatattttttttattttttaggttagaaaattgaggtttaggttggtgatttttttgtttagagtttagtgagtggggttttgtttaaggtgagttttttgagttttttttattttttaatattgtgtttggaggttatttatattttttgggtttattttttgagaaggagtttgttttttggatttattttaggttgttgtttttgttttttttgatggttgtgtgatggaagtattgtgtgtttatttgttttttattttttaatttggagatagaggtaggttagatagtggttttggttgagaatttagtttaggtaggtaggtagaagggttggggatattgaggttttataggaaggtggttgtagaggtagagggttatgagtaggtgttaatttggagttgtgtttttggggtgggggttatgtgaaaagaaatttgggtttttttgggtggggtgtaagttttagtattatagaatgggaatggattatataattggggttataagtaggtttttttgatttagatttttgatttttttatttaatattgtttgtagatttgtttatgttttatttgtttgggttttatttttgattttttgagtttagtgggtttttttgtaattgagttggtagaaagtgaggttttttaatagtttgggggttttgagtgttttttttagtagtttaattttttttttttttaaatttgtggggagattttttgtagttatatattttaaatttgtatagagttttgtttgaagagaggtgggtgggggtttaggtttttattttgtttttttgtttttattttttgttttatttttatggaatttaagaagattttaagtaattttttttaaatatggatgtgagagggttatttaagaggtgggtttatggttttttttagttgggaatgtttattatttttttttttttttttttaattatggaattttttttttttttttagaaaggtttttttggttgttttttgttggaggggaggttgggttgggttttttttgggatttgtttatgttttttatgaaatttgagagtttgtttttagtaggtgttgtgttagtggtggtggaaaggatatttttattgattaaggaagtaatttggattattttgtatagataagattggaggtttattttggagggtggaaattgtaagattattttggggaaggattttgttagtgtggttagtattttattttgggataaagggttttgtatgaggaagttatttttttgttttttgttaatattggttttgtttgtgtgatttttataaattattttagattatttagtgtagtttatgtttgttttgtaattttataaaataattttttaaggagattagtgtttttttttggatttttagttatttattttgtttttttagatggttgttttttgtttgttaaataaattatttgtgttgttaaaattttattgagaatttttaggaagattttggttgtattgtagaaaagaggtgggttttgatgagatttttgatatttttttttttttgttgttgtgtttgggatatttttgttgatttttttggtgttgtgtttaagttgaatatatagtagtttagttttagttttagtttttttggatttatatttagggagtgaatgtggttttggtttgtttgagagggagatagtggggtttatttttttagtgattttttttttattttttgaatattaaatattattgatgttttttgggttttaggttttattgtaaagtataggggtttttgaggagtttttattgtggttttgttttttgatatttgtattgtttttttgattttgattgttttgatatagttttttaatttttaaattagggaatttttttgaaggtttagtgaatttatttatattgtttgttgagttgattagttaagaaagatagtttgtgaagattgttaatttttttattttttttagggttttgagttttagaagggttagaaaatattaagagagtttatgaattgttttgtagtttgattttaaaatttttttgggtaaagaaatgataaaggattgtatttatagtaaggtagggttatttagggtttattttaaggtggttttttttgaggtttaggtagaaatggtgttgtttttggtaattttttggggaagttgttatagtaaatagttatagtatatgttgattttttttttttttttaaaaatttgttttataaagagtataatgtgttggagagaatattggtttttatgtggttttaaaattaggtatgttatagagggtggaatttgggttagttgttgttggtgataattgatgttatttttgttagtaatttttgtttgttttttttttatttgttttattgaaggtttttaggggattgttgtttgtttttttttgagggaatgagtgttatatttgtatttataataaattagtgagttttttattttttttttagtagggaggaatttagatatgtggtttttggaagttaagtgggtttttgtgtttgtttttgagttttaggttatttatttgtgaattgggtataatatttagttttttttggggtaatttttttgaggagtaagtgaaatagtgtgttgagtgaatgtttttttaaagtattgagttggttgttttaggaaggtattatgggggagttgaaaatagagaattttttgggtgttgtgaagggagaaaagtttaagatgttggttttgttaaaagtttaagtttgtttatgatggtttagtggtgattgtagggtggaggagaggtatgtgattgttttagttgatttttatatgttgaaagttttatggttatgtgtagtttattttataatgttgtatttgggttatgggtggtggtgaggattgtggatatatttagggtaatgtgagattattgttaatattttttttaaggttgttttaattttaaagtagttagtttgatgtttgttgatttggggtatatattttaattttttgatgttttagtttttttgtttgttaaatggtgatatgttggtattttttttttagggtttttgtgaggtttaaaggaagtattgggtttagagtttagttagtgttatagatattgtttttggtgttgtttttgtggtgtgtttgtgtagggttatattgttgtttttttgtggttgttttttttggtgggtggaatttggaatttttagaatagattatggatgtttttttgttggatatttttttagttttattttgtgggagttgtggtggggtttaggagagtttgtttaagagggtgtgtaggtgggtggtagagttggagtaaggtattagttttaatagataggagtttgaggttggtagaagtgggggttttggtttaaggtgtggggttaatttggttagagttgagtttggtagggttttggtaagattttgtggtttttttgttttggtgaagtatttttttgtttgggtttttatttgtttgtaagtttgttgtggatagtgtgatttttatagatgtatattgtgtttattttatagatggagaaattaaggtttagagaggaagtgatttgtttagagttatggaataggaaagtggtagggtttttatgttttgatttttaggttagtgtttttgttgttttattgaggtttttgggaattataggttttgtgtgttttttttagttttttaggggttgttgaatagtttttaagtggtgttggattattgaagatgtttttgtttattgtttttttaggttttagggttatgggttatgttttttttttttttgggtagattttggttttggttttgtttggtatttgtgatttagtttttttttgatttttttgggtttgttggattggaagggtatttgtgtagttttttttgggtttttattatttattgatagatagtgttggtggagagaagggttttagtggtgatgtattgggtttgataattagaaattttggtggtatttgttgagtattttttatgtgtttttttttttgttgggattttaggattgaaatttaggttatatttttatagatgttttggtatttttaaggtaattttgaaaggaaagtatgttgatgaattaagtaattgtttgtttaattttttatgttatttttgaatttaagttttattgttgattattgggagtaggagttagtatgtttattgatagataagtaaattgaggtaaagaggttagatagttaggtatggtggtatatgtttgtaattttagttatttaggaggttggagtaggaggattatttgaatttaggagtttgagattagtttgggtaatatagtaagattttgtttttttaaaaaataagatgaataatatatttttaaaaagagatttgataaattatgtaggattatagagttaataaatggtgatattatggtttgtaagtttttttttagtttttggttattttttgtttttttggtattggtttttttggaattttttttaggtaggtggatgggaaaagaagtgaagatataggttggtagttggtgttgtgatttggagttttgtttttggtgttaagttgggttttagttgaaggagatttgttggaggggttttttttgtgttttttggggagtaaagatggttttggagatggagatatggtttgttagttttaagttattttaaaggtggggttggtgggttaggagttagttttggtttttttgttatgttgtgtgtggttttgttttgttattttatttgttggaggatttttttgatgttttttagtgggttttaatattttgtgattaggattttgtatgaggtagagggagggtaggagttggagtttagtaaggattttaagtttagggataggttttatttgttatatttgttaagttgtgagggttttaggtgtttgggaggagggagtaggagtggaagtattagtttgagttgttaaattaggttatgtattatttgttattttttgttggtagaaggagattatagatattagaagatagtagtttttgttagaattgggtttttttatgatttttaggtggtgattttgaattttagaaaaagtgttttggggagagtggagtgaaggaagagtgtgaatattggatttgattttattttagtttttgtgttgtagttagtagggtgagtttaggatagttggtagttgtttgggtttagtttttttttttgtgaatgaaggtggtggggagtgtatgtgtgtgtgtgagtgtgtgtgagtataaatgattgtggatgtgagagtttatgaaagtgagaatgtattagtgtgtaagaaagtgtgagtatgtgagaatgagtgtgtttgtgagaatgtatgtatgtgtgagtataagtgtgtgaatgtgagaatgtttgagtgtgagaatgaaagtttgtaagtgtgttagtgtgagggaatgtgtgagtgtatttgagagtgtgtgtgtgtgtgtgtgtgtgtgtgtatgtatgtattagattaaataagaatgtatttaattgatattttttggatattgttatttattaggaattattaaaattagttattttagaggagggtggatgttgtattaggggatatttggtaatgtttgtagatttttttgttggttgtagtgtggggtgtatgttgtgggtatgtggtgggtagaggttagggatgttgttgagtttttttttgtgtttagggtagtttttaaggtagaggttgtttgtggggtttaaatgttagtagtgttgagttgaggatttttgtttaggaggtatagatgttgttttggatgttgtttagatagtatttgttttgttttttagggggatagatagatagtggatatagtttagatgtagtttgatgagtgagtttaagggagtgtttgtttttttgggattgtgagttttgtgggggtaggaattgggtttgtttgtttatgatttttagatgagttttatagttagttttattattatagttggtgttatttttgttttgagttttgtgttgggtatatagaatttagtgggtagaaatttttgaataaattttgagttttttattttgtttttgtgaatttagatgttttttgagggttagtttggtggtgtgggggttgggagtgggtagattgtagggagttaagttttggggtggagtggggtttaggtttttttttttggtttgagttgaagtattttggttttttaaattttaaaatttttattttttaatatttttatatgttgaatttttttatatgattttttttggataaaagtttttgtaaaaaaagtttgaaaagttttttggttgaggtattagggataaggtaagggttgtttgatgggtttaatttgggagaattgaggtgagggagttgttttttttttattttataggttggttagatggtggattgttagtagttggttgggttaatttgtagagagtattttttgtagtttttggtttatgtggttttagtattgtaggatgtgattaatatgtaggttattttgaggtttgtagtttttatagtttttttagattagtgtaaagttttatttagttttttggtagattttagagtttaggatattttttaaatggtttaaaattaatggaattatttgggggataataaataatgttattagatattgttaaatgttttttgggagagaaaattttttttagtttagatatattttgtgattatttttagtagttttatttttggattttttaaaggtttttagtagtgagggggttgggttagagaaggttttattagtttttaaaagtagatgtttaagaatttgatatttttaggatatatagtgatttttttaatttattgttttatgtggtttgggaagttaagttgtaggaataaaaaaggtgttgggtagggtaaagaggttttattagatagaggaaatggggaaggtggatatttttgttttttttgttttggagaatgagagagttggtggagattgatagatattatgttttaatgtgattatggtttttggaagttaaagagaattgattaaattgggttgaattatagtattttttgagtttttttaaatgtagaatttgttttttagatattgtatttttggggtttagtaatgatttaaaagtgaattttattgaaagtatgttgttgagttatattgtttatttatttagagagggagttgtagtttgattttttgtttaggagagttttttgtgttgggagttagaggtagagaaaagaataagttatttgtttgatgaagtttatagataggattgtttgaatttatttggtgggatagtgagagttttttgattttattttggtgtgttttgttgagtagggtatgttaagaagtttttgtgaaatgagaagtttttttatttttagaatgaggggtggtgttggtagggttttgggtttttggaaggttttttaggttatgtaggtgaggtgttttataggttagggttttgggattatgaatttgttgaattagtaaggttaatagatgtgggttttttatgttttttgtttttaagttggtagttgtttaggaatgtttataaatataaaattgattttgtttttagaatgttttggagtatagattttaaagtttgtataaagttatttttgtggggttggttatttattggggaaaattatgttggggttttagattagagtattttagtggagagtaggatttgtttatggaatgttatgtgttggtataagggatggatttggggtggatttggggtggtttgtatttgttggttgatttttaagaggtgttttattaggtttttgggagtttttgggtttttagaggagttttaggtaggaattttagaggtttgtatttttttgattattgtatttgaggggttttgggtagtgtggggtttaggtttttattttgaagttggttgtgtgagggttttggttaggtgttttttatttagaaagtttggatttgtgaattgggtgggtggtttgggttttttttttttgttatttattttttttttgttggttttttgttgttgtttgtaagatttgattttattttgtattttttatgttttattttagggattgatgggtatttagtttttttaatttgattattgatttagaagaatatatgtttatatttttggtttttagatttagtttttggaggtatgtttaatagatagtattatttgtttaagttttgtattttagggagttagtggtagtattttaagtttttttgggttgtgttttagtttggttttgtagtttatatttttgtatttgttttgtgttagagtataggtaatttttttggtttattttttgttttgatttaggaagtgttttttgttttggaggtttttttttttataaaattgtattgtgtgtttaaatgtttgttaaattttttgatttaaggtttttttttgtttttttttttttttagtaggtagttgagagttttgtattgtggggtgtgtatgtgtgtttatgtgtatgtgtgtgtttgtgtgtttgtgtgtttgtattattaattttttgttagggttaattgtgaggttgaagtttgtattatgtttatatgtggtaagtattgtgtgagtttgtgttttttttttattgttatatgggggttgtttgattttgggattagtaatgtaggtttttttttagaatgtagtgagttgtattttgggtatggtgggtgggtttgaatttggtatggggatttgtttgtgaggttgatttatttattttattgggagggtggtgtttgtgagttttagtatttttttttaggaaatttattgtgttggttttaatgggaagattgggttgggtttatgggttgtgtgtataagggatttttttattttttgtagtgtattatgagggaggtgaagttgttgggtagagtgtaggtttggtttttttgttattggttttggatttgttttttttaggaaattttttagtaggaagtgttgattttttggtttttgtttttttgtagg

SEQ ID NO: 362 - DNA, 17897 bp, Artificial Sequence
  chemically treated genomic DNA (Homo sapiens)
tttgtaaggagataaaggttaaaaggttaatattttttgttgagaggttttttaaaggaagtaaatttaagattaatggtaagaaggttaggtttgtgttttgtttagtagttttattttttttgtgatgtattgtaggggatgaggaggttttttgtatatatagtttatggatttaatttagtttttttattggggttagtgtagtggattttttgggagaggatattgaggtttatagatattatttttttaatgaaatggatagattagttttataaataggtttttatattaagtttaggtttatttattatatttaggatgtagtttattgtattttagaaggggatttgtattgttgattttaaagttaggtagtttttgtgtgataatgaaaggggaatataagtttatatgatgtttattatgtataggtatagtgtaagttttagttttatagttagttttaatagaaggttggtgatgtagatgtatagatatataggtatatgtatgtgtgtgaatatatatatatattttatggtgtaggatttttggttgtttgttaaaagggaagaggggtagaggaaaattttaagttaaggagtttggtaggtatttgaatgtatagtataattttgtaagaaaaaagatttttaaggtagaaagtattttttggattaaagtaggggatggattagaggggttatttgtgttttaatatagggtaggtgtagaagtgtgggttgtaaaattagattgaagtatagtttaggaagatttggaatgttgttattgattttttggggtgtaaggtttgggtaggtggtgttatttattaagtatgtttttaagagttgaatttagaaattagaagtataagtatgtatttttttagattagtagttaagttagaaaaattaaatgtttattaatttttggggtgaagtataaaaaatgtagaataaggttaagttttatagatagtagtagaggattggtggagaagaagtaagtgataagagggaagagtttaggttatttatttagtttatagatttagattttttgaatggaaaatgtttgattaaagtttttatatagttagttttagagtgggaatttgggttttgtattgtttaaggttttttggatgtaatggttgagagaatgtaagtttttgaaatttttgtttagggtttttttgaagatttaggaatttttaagaatttggtgaaatattttttagaggttagttggtaagtgtgggttattttgaatttattttgggtttattttttgtgttaatatatggtattttgtgggtagattttgttttttattggggtgttttggtttggggttttagtatgattttttttagtagataattagttttataagaatggttttatatagattttggagtttatgttttagaatattttgaaaataaagttggttttatatttgtgagtatttttgggtagttgttagtttggaggtaggaggtatgaaaggtttgtgtttgttagttttgttaatttagtaggtttgtggttttaagattttggtttgtgggatattttgtttatatggtttagggagttttttagaaatttagggttttgttaatgttattttttattttgggagtgaaaggattttttattttataggagttttttagtatattttgtttagtaaagtgtgttagggtgaagttagggggtttttattgttttattaggtgggtttaagtagttttatttgtgagttttattaagtaggtagtttgtttttttttttatttttagtttttagtatgagagatttttttaggtagaaagttaggttgtaattttttttttgaataaatgagtaatgtagtttaatagtatgtttttagtaaaatttatttttaaattattgttaaattttaagagtgtaatgtttggaaaataaattttatatttaaaaggatttgagaaatgttgtggtttagtttagtttggttagttttttttggtttttagaaattgtgattatattaggatatagtgtttgttagtttttattagtttttttgttttttagaatagaaaagatagaaatgtttattttttttgttttttttatttggtgaaatttttttattttatttggtattttttttatttttatagtttagttttttagattatatgaggtaatgggttaaaaaaattgttgtgtgttttagaaatattaagtttttgagtatttgtttttgggagttggtggggttttttttgatttagtttttttattgttaaaggtttttgggaagtttagagataaaattgttgaggatgattatggggtatatttaaattaggggggatttttttttttaggggatatttggtaatgtttagtgatattatttattgttttttaaatgattttattgattttgaattatttaggaagtgttttagattttgaagtttgttgggagattggataaagttttgtattagtttggggggattgtgggggttgtaggttttggggtagtttgtatgttggttgtgttttgtaatattaaggttgtatgaattaaggattgtagaaggtgttttttgtaggttgatttagttagttgttggtggtttattatttggttagtttgtagggtgggaggagagtggtttttttattttagtttttttgagttgggtttattaagtagtttttattttgtttttgatgttttaattaaaaaattttttaaattttttttgtaggagtttttatttaaaggaaattatgtaaggaagtttaatatataaaaatgttaaaaaataaaaattttaaaatttaaaaagttaaggtgttttggtttaagttagggaaaggggtttgaattttattttattttaggatttggttttttataatttgtttatttttagtttttatgttattaggttggtttttaaagaatatttgagtttatggaagtaggatggaaaatttaggatttatttagaggtttttatttattaggttttatgtgtttaatatagagtttagaataaaaataatattagttatggtgatgagattggttatgggatttatttggggattatgagtaaatagatttagtttttgtttttatggagtttatagttttgaggggataggtatttttttgggtttatttattaggttgtatttgggttgtgtttattgtttgtttgtttttttggagggtagagtagatgttgtttggatagtatttaggatagtgtttgtgttttttggatagagatttttagtttagtattgttgatatttgggttttataagtagtttttgttttaggggttgttttgagtatgggaggaggtttagtagtatttttggtttttgtttattatatgtttatagtatatattttatgttgtgattagtaaaagaatttgtaaatgttgttaaatgttttttggtgtgatatttatttttttttggaatagttgattttagtaatttttagtaggtaatagtatttagaaaatgttagttggatgtatttttatttaatttagtgtatgtgtgtatatatgtatatatatatatatatatttttaaatgtatttatatatttttttatattgatatatttgtaaatttttatttttatatttagatatttttatatttatatatttatatttatatatatatatatttttataaatatatttatttttatatatttatatttttttatatattgatatatttttatttttatggatttttatatttatagttatttatatttatatgtatttatatgtatatgtgtattttttattatttttatttatggaggagggggttgggtttaagtggttgttagttgttttgagtttattttgttggttgtagtataggggttggagtggagttagatttaatgtttatattttttttttattttattttttttaaaatattttttttgggatttaaagttattatttgagaattatggaaggatttagttttggtagaagttgttgttttttggtgtttgtgatttttttttgttagtaggaaatggtaggtgatatgtgatttggtttggtggtttgagttggtgtttttatttttgttttttttttttgggtatttgaggtttttatggtttagtaagtgtggtaggtggagtttgtttttgggtttgaggtttttgttggattttagtttttgttttttttttgttttatgtaaagttttaattatagaatgttgggatttattagaaagtattaaagaggttttttagtaggtggggtggtaaggtagggttatatatagtatggtgggggaattagggttgatttttagtttattagttttatttttggagtggtttgggattgataaattgtgtttttatttttaaggttatttttgttttttaagaagtatagaagaaatttttttagtaggttttttttagttaaaatttagtttagtattaaaaatagggttttaggttatagtattagttgttagtttgtatttttatttttttttttatttatttgtttgggaggaattttgagaagattaatgttagagaagtgaaaggtagttaggagttgggggaaggtttgtaggttatggtgttattatttattagttttgtgattttgtataatttattgaatttttttttaaaaatgtattatttattttgttttttagagagatagggttttgttatgttgtttagattggttttaaatttttgggtttaagtgatttttttattttggttttttgagtagttgagattataggtatatgttattatgtttggttatttaatttttttgttttagtttgtttgtttgttaatgggtatgttaatttttgtttttaatgattagtagtggggtttaaatttaagaatggtatggagaattaagtaaatagttgtttaatttattaatatattttttttttagggttgttttggagatgttaggatatttgtgaggatgtggtttgggttttagttttagagttttagtgaggagagggatatatggaaaatgtttagtaaatgttattaaggtttttgattattaggtttagtgtgttattattggggtttttttttttattagtattgtttgttaatgagtaatgagggtttaagaggggttatataaatatttttttagtttagtagatttaggagagttagaggagagttggattataggtgttaggtaaagttaaggttaggatttgtttgaggaagaaaagaatgtgatttgtgattttgggatttgggagggtagtgggtagaggtatttttagtaatttgatattatttgagaattgtttaatagtttttgggggattgagggggatatatagagtttgtgatttttaaaaattttagtggggtagtaggaatgttggtttaggaattagggtatggggattttgttatttttttattttatgattttgagtaagttattttttttttgggttttggtttttttatttgtaaagtaggtatagtgtatgtttatggagattatgttgtttataataaatttataggtaaatggaaatttaggtaggaaggtgttttattaagataaaagggttatagggttttattaaggttttgttaggtttagttttggttagattagttttgtattttggattaaggtttttatttttgttagttttagatttttgtttgttaagattagtgttttgttttagttttgttatttatttgtatatttttttgagtaaatttttttgggttttgttataatttttatagggtgaggttgaaggggtatttagtagagaaatatttatgatttgttttagaagttttaggttttgtttattaggaagagtagttataggaaggtaataatgtaattttatatagatatattataaaaatagtattaggaatagtatttgtggtattaattggattttaaatttggtattttttttaagttttatagaaattttaggagggaggtgttagtatgttattatttaatagatggggaaattgaggtattaagaggttaagatgtgtgttttaagttagtaagtattaagttggttgttttaaggttaaagtaattttaaagggaatgttgataatgattttatattgttttaaatatatttatagtttttattattatttgtggtttagatataatgttgtaaggtgggttgtatgtgattatgaggtttttagtgtgtggaggttagttgggatagttatatgttttttttttattttgtagttattattgagttattatgagtaggtttgagtttttggtaaaattagtattttgaatttttttttttttataatatttagaaggttttttgtttttagtttttttatagtatttttttaagatggttaatttaatgttttggaaaagtatttatttagtatattgttttatttgttttttaaggaggttgttttgggagaggttgggtattatatttagtttataaatgggtaatttgaggtttaaaaataaatataaaggtttatttgatttttaaaggttatatgtttagatttttttttattgagggaaaggtgaaaaatttattggtttgttgtgggtgtaggtgtggtatttatttttttgggggagggtggataatagttttttggaggtttttagtgaagtagataaagggagagtaggtgggaattgttgataagggtagtattgattgttattaatagtaattggtttagattttattttttgtaatatgtttggttttaaggttatatgaaagttagtgttttttttagtatattgtgttttttatagaatagatttttaaaaggagggaaaaaattaatatgtgttgtggttgtttgttgtagtaatttttttagaaaattgttgagaatagtattatttttgtttgaattttaaggaaaattattttgagataggttttggatagttttgttttattgtggatataattttttgttatttttttgtttaaagagattttgaagttaagttataaagtagtttatgggtttttttggtgttttttggtttttttgaaatttaaggttttggggagggtgaggaagttggtagtttttatgaattgttttttttaattaattaatttagtaaataatatgggtggatttattggatttttaagaaagttttttagtttagaggttagggaattgtattagagtaattagaattaaggaaatagtataaatgttagagaataaaattatagtaggaattttttgagggtttttgtattttgtagtggagtttgaaatttaggaggtattagtgatgtttgatatttaaggaatgaaaaagggattattaagaaggtgaattttattgttttttttttaaataagttaaagttgtatttattttttgggtgtgggtttagaggggttggagttgaaattgaattgttgtgtgtttaatttgagtatagtattagggaggttagtaagagtgttttaaatataatagtaggaagagggaggtgttaggaattttgttagggtttattttttttttgtaatataattgagatttttttggagatttttagtggagttttggtagtatgagtaatttgtttggtagatagaagatgattgtttgaggggatgaggtgaataattggaagtttaaaggaggatattggtttttttagaggattattttgtgaaattgtaagataggtatgagttgtgttggatggtttgagataatttgtggaaattatataaatggagttagtgttagtagaggatgaggaaatggtttttttatatagaattttttgttttgagatgggatgttagttatgttaataggatttttttttagaatggttttgtagtttttattttttggaatgggtttttgattttgtttatgtaagatggtttaagttatttttttaattagtggagatgttttttttattattattaatataatatttattaaggataggtttttaggttttatgggagatatggataggttttaggaaggatttaatttagttttttttttagtagaggatagttaaggaggtttttttggagaaaggaggagagttttatgattaaaaaggaggaaggagagatggtaagtatttttagttgagagaggttatagatttattttttaaatggtttttttatatttatatttgaagagggttatttggaatttttttaggttttgtgggggtggggtagagggtgaaggtaggagaataaggtggagatttgggtttttatttatttttttttaaatagaattttatgtagatttaaaatgtatagttgtagaaagtttttttatagatttaaagaaaggaaagattaaattgttggggagggtatttaaggtttttagattgttaaggagttttattttttattagtttagttgtaagaaaatttgttggatttaaaaggttagagatggagtttaggtaggtagggtataggtaggtttgtaaataatgttaggtgggaaagttaaagatttgggttaaagagatttgtttatggttttgattgtgtaatttatttttattttgtagtgttggggtttatgttttatttgagggagtttaggtttttttttatatggtttttattttgagaatatggttttaggttggtatttatttatggttttttatttttgtagttgtttttttgtggggttttagtgtttttagtttttttgtttatttgtttgggttaagtttttagttaagattgttatttagtttgtttttatttttaagttgaaagataaaaagtaagtggatatgtggtatttttattatatagttattaagggaggtaggaataatagtttggggtggatttaggaaataagtttttttttaaaaggtgggtttagagggtgtgggtggtttttaagtgtaatgttggagggtggaaagggtttaggaggtttattttgggtagaattttatttattggattttggatagaagagttattagtttgagttttaattttttgatttgagaggtggaaagaatgttttttattttagttagttgatgtgatgtattgaatttttaaggtattatagtaaataagagttatttattgagtatttattaattttttggtattgtggatatagggtggtttgaaggtatagtggtatgtatgattatattttttttttttttttttttgttattttagagtagaggtttttaattttgtttgtttgtaggatattttatttttaatttagttaaaggagttttgaaataatagtatattttttgatggagagagaattgtaggagattgggtttggaaatgtgtattttagataagatttttatgatattattatgtaatttatataagtttagtaaaaagtaatatttaggttaagtatttgtaggtatttttatagttttgggtaggtttaggataaagggttttagattttgtttgttaagaagatgttttgagaatgttttttgtgggtgttattgatggtaaatatttatatgttgttttttatatgtttagtgttgtttttaggttatatagattaatatttatatattttgatggtattatgtttgttatttttattttatagaaaagtaaattgaggtatggagtttttgattgtttttttatttgagtttgatttttttaggtgttttaatatgttgttatggaaaaaaaataaaggttttgaagtttaattgtttgggtttaaagtttggtttttttatttgagttatatggtaataggtaaattttgaaatttttttggttttagttgttttatttatttaatggagtaatatgatttaggtaatgtttttgtgaggatgaaggtagatggagggagatagtggttgttttggagggagagagatgttgtgtttttttttggttttttttttaggttgagttaaatttgaattttgtttgagttttagatgttgagttattatgtttttttttttaggataaggtttttgagttatatttggaatgggattttttggggttgggttttaaggaagaattgtagttttgggttatttgaaaaatataatgttattttttttttaggtttatgaggaggtaagtttaggttagtggattttaatgtaatttaggggggtttttagtttagttgagatttgttttttgttatggggggggggtagttttatttagttaaaggttaatttagggggttgtagtttttaagtttttgttttttaggttggttttgttaattttttaagaatatttgatttatatttaaaaaaaattattttgttttgtttttttggttttaaaagtttttttattagaaatttaatgaagatgtaatttttttttgtttttttatagtaggtaggtaaaattttgttaggaattttttttattgtttttagttttatttaggagttttttataaagttgagttttagtttagtttggtttgggtatatttttttttatttttgtgttttattttttatttgtaaaatggaaagaagttggattaggtaggttttgtgtgagttttttattttattttaaatgattaaattttgttgttttaaaagaatttttttataagagatttaaatagatattttaggattttttaaaagtaaaagttaatatttttatttatgtatagtttattattttgtttgaaatttaatttgttggtttataggagaatggggtagaagatttagagttatttattttattttatgtgtatattttaattttttttatttgttaggtgttgggttaggggttaggttatagggtagggtaggtaaatttttttttttgtttagatgtagtgggagatatggttttataaagttaagaagttataggttaggggaatatttagttttttatttatattaaaatttttttttttttttatatttttttttatttttgatattgtgttattttagtttggggttggttttgttgttatatatattatatagaattggtttgtgtttttagttgtgtgttttttttattagaaggtagtttttttaagaaaggtgttggggtttgttttttttgtattttgtttattttaattatatttgtgaaatttaataagaatgttagaattttttaataggaagagtttagattgaaaaatttgttttgaaattatatttttgtagtaagaatagggggtttgtatttagatatgtttttttgaggtagtttaggagaaggttttgtgtagttgatgggtattataaggatgtttattgtttttttgtttggttattggttgatttttgaatattagatattttttagtagtttaaagaaattaaataaattgaagtgtttttagtgtttgtgaggaaggggtgtttttggatgggtataagataattaagggttttgttttttttatttattgttaggtattttttatttttaagttatagaggtgtgttgtttaggatttttagggatagtagggataataggtgggggatatgggggaggggtgggtaaggaattgatttattaaattttagttttagttattaatttgatagaggtgtgatagtgtgttttttttagaattagttgtattttttaagtttagtttgaaatttttttttgaggttgaattagagattgtggtggattttttaggaatgttgaagtaattttagttgtttttttttgtggagggtaggagtggttagtattagaggtaggggaggggaggaaagtgggggagggtgggtggaggtgaaaatgatgttatttttagttttagttagtttaaggggttgttaaatgtttgtgagattttttttgtttaggttattttttttatgttgttgatgtgttaattttgggtttttttgggggtgtattttgtttagtggtgtttgtagatatttgttttggtttgtgtgttgtattgtgatatattttggattttttttttatatatatgtttatatttatatatgtatattgttttgtgtgtgttatgggattgaagtgttattagttttttggatttatatttgtttttgatttagtttgtaagttagatatatttatgtttttttttttagtttttttgttagtgttatttatttttattaattttttatttatatatttgtgtgtaatttttttgtttttagatatagatatatatatatatatatatatatatatatatatatatttatttagttttttttgtatttatgtttagtgtgtatttttgttagtggtgttagttgggatttggagatgatgttaggaaatgttattttggtatttttttggattgttttattgttttttttttgatttttagaattttaatttttagttaggggggagatgaatgggattttgttttttttttttttttttttgtaattgaattttttattttagtggtgtttgtatttaaagtttttttgtgtttgtgttttggggtgattgtgtatttgtagttttggggtgtttatttttggagtatgtggggttataaagggtggttttggtgttttagtggtattgtatgggtggtttttttttgttttgtgttgtgtttgggagaagagggtgtgggtttatttaatgtgagggagaaaggaaaggatggtgttgaggttggtggtttagtgttttgtggaagttgagggtggatggtgaattgatgagttttagtattagttgggagttaggtgaggtttgtttatgtttgggtggagggtgattttataggtgttgtggttttgtttttgtgttttgttttttttagatttttgtagttttagtatgtagttgggatatattttttttttgttttttgttttttttttttgggtgtgttgggttgggttgggttttggtagtgtgtggtgggtgtttattggagttgttgtttgttgtgtaagtagttgtaggggtgtggttgggaggggtattggggtttgggttgtgggttggttttgtagttttttttgagtttagggttttggtttgtgtagtgggtgtgtgtgttttgtttggaggaggtgtttgtgtgtttgtgtgtgtttatgtgtgtgtttgtgtgtgtgtatgtggatttttttgtgtttttgtatgggtggaggttttttatttttgttttagagttttttttaagagttttgttgtgttatgttttgagtgattttttttattttttgtaggttttattagtttggttttttagttggatttggttgtttgtttagtagttgtttttgtttttgtttgataggttttttttgatttttagttttttgtgttgttaaagtttttgttgaaatttttgtttttgtttaattttgtttattttgtttattgttgtttagtgtttatttttttttttatttttttagttttaagtatatttattggattttgtttattgggttttttttttttgttttataagtttagatgagaggatttttatttttttttattttgattttttgaatttttatgatttattttttttaattttagtattgttttgttttgttgttttgtttgtgtgtaattattggtttgtatgtttttatttggttaaagaaattagtaatttttaatttttattgtatatgagaagttttagaggagttgttaaattaaaaaataaataaatagatagataataaaaagagagagatggattttagaatagtttaattagaattttagggggtgtaaattaattgggtattggggtttttataaagttatttaggtggtttttgatgtgtagttaggttgagaagtattgtatggaggaatatgattttatgaataaaggaagtttgatttatagttggtattgttattgtttttaggttatttgtttagtgttgaatttgttattgagtttaggattagatttagggtaagtttaggtgattttttttgtgtttttatagatatatatgtgtgtatgtataatattttttgttgaattgtaaattttttttttgtgttaatttatgttgtttttaaggtaggggttatggtttttttttttgattattagggttagttttggagaagggttttttggaataaaagaaatatggagaggggtaaatagtatttttaggatttaggatatttgtgttttaggtttgtttttgatattattgattataaattaataaatttgggttttagaatttttattggtaaagggagaggattagatttaatgattttttagaatttatttagtgttaaagttttgttattttattataaatgattagtgtgaagaatagagttttagtgttatgggttttgttgttagaagagtttggttaaattataaagtttggttattagttatgaagtttggttaaattataaagtttggttatatttaagaatgttttgaatgtaggagtatatttttttattttagaaaatttaatatttagaattaataagtgaatgaatgattattgggtagttttttattttttatggatttgaattagtttaattgtagtatttttagtgagggaaaattttttttattttaaataaaatgttgtgtttaggtagagtggtttatatttgtaattttagtattttgggaggttaatgtagaagttttttttgagtttaggagtttgagattagtttttataatatagtgatgttttatttttataaaaaagatgaaagttagttaggtttggtggtaagtatttgtagttttagttattttagaggtagaggtgggaggattgtttgagtttaggagttttagaaaagtttgagtaatataatgagatattatttttataagaaaataaaaaattaggtgggtttagtggtatgtagttgtagttttagttatttgggaggttaaggtaggagttttgtttttttaggttttgaaatttatttattttgttattttataaatgatagaattgagttgtttttatgagttgggttttgtattttgttattgggaaaggattgaaaaggtaaaaatattttttataggtgtatagtatggtatagttttaagatgtagtttttttatttatatagtgtggttgagatgaatttatttattttttaattatattaaggatttattatgtttaggtattattttagattttggggatatgattatgaataatagtaataataaaagtgtatttttgggagttattttgttgtttaaagatttttttagattaagtagtttgtgtgtttgttattttttagttagtttatatatatttatttttttataggttttttattgtggtgatttattgagtgagtatttttggttttttatttgttaaagatataagagtgttaagtttaaaagtgtggagtgttaagataaggaatgttaagtttaaaggtgtagggaaggtggtttatttttttagtaataaatggaattagtgtatggaattagaagggtattttgttaggggaggtttttgtttgtttttttgaggaggtttttaggatagaatgtgaagagtagtttagatttgtagtttgaaattttgaggaggttgtttggtaggaggttgggtttgtgtgggaagtttaattttttggaagattattagtattgaataggttagaagatagaggaaggagagtggagtgaagagaaaagagtagagaagggaggtaagaatttgagtaatggaatataattttttaagtgatggtattttaaaattagagtttatattattttggagaaggtttgaggaagatattatttggattttatattttttttttttagtttaatatagttaattttttttttttgttgaaaaggatgtttttttttgttgagtattagatgaagtagtttttttagttaagtgttatgttgtaggagaaagattgtttttagtataggtttggatgtatataaagtatagaggatgtttattttatatagaggttttttattgggatttgggagttgtatgtatttttatattttttattgtagttagttgaggtggtagaagtttatggagttgaatgtgggtgtaattgtattgattgtttatattattttttttttttgttggttagtagtagaattagatttgtttagtaaatgtatatgtgttgtaaatttgttataggatgagattggattttttggattaatgtttattggaaatttttatttaataataatttagattttatattagaatattttaattaaatgttttaaaaatgattataggaattatttgtttttaattgttttttttaaaatttatgggtatttggggttgggagagattaagatgtagtagggatttatggagaagaatttggtggtttgtggtttttagttttaattttattatttatgagttgtagtatttggggtaaattattttatttttttgtgtatggaggaaatgagtgagagaaattattagattttttaattataatttatgggtttattgttgtagattattattttttttgtttgttaaaatgaaaaagtgtttgtaaaagtgtttttttatttttagttttgggtttttttgggatttttttttttttttagtatttattttttttttttttttggattaaattaattaataagtaaatatttattgtaattaatgatttattttaaattaatttttttttaattttaagttttttatttttgtattgtagtttaattaataagtaaatatttattgtaattaatgatttattttaattaattttttttgatttttaagttttttatttttgtattgtagtttagttttttttatttttttttttttaaattttttaaaataagtatttgtatttaaaggtttattttatttttttttttttttattttgtagtgattattaagttttttttgaatttggttaaataagtttttaaaatttgttaggaaaaataatagtttttgtttttttatttttttatttttttatttttagaagttattattttttgtttttggagaattatttttattttatttttgttatttgtagattttatgtttttgggtaagttattttattttttttttttgtttttttatgtataagatatatataataatatagggttattgtgataaatatatgtgttaatatatgtaaagtgtttagaatagtttttggtatatagaaggtttttattaaagtgtttatttttatttttattgttattattattattattattattattattattattattattattttgttttattttttttggtattttgtatatttgattgtagagaagtttagtaaatattggttgaagaattgagtaaatgtagatgtttttttttgaatttattttattttatttggttttattgtttggattttgttaggagggaaaaggggattttatttgttttatgattttaggtggagggattgttatttgggatttttatttaagtaaaagtaaattattttagttatttgtaagtatgtttggtttgtaatattatgttgtgagtaatgaaaattaaaaaaaaaaaaaattatgaaaggaaaataattttaaatgagggtgaagggtaggttatgtttaggatgtgtaataaattttttattttgaatataaatgaagagttgtgtaatgt

SEQ ID NO: 363 - DNA, 5987 bp, Artificial Sequence
  chemically treated genomic DNA (Homo sapiens)
tttttaatttgtattattttttttattttaataattttttttaatattttttataaagtagatttattggttatagaatgttttaatttttatttgtttgagaaaattttattttttttttatttttgaaagataattttgtagggtatagaattttaggttgtaggttttttttttttaaagtgaaatattttattttattttttttttttttgtatggtatttgagaagaagttagatgtaatttttattattattatttaaaagattgtttttgtttttttttttttttttttttttttttttttttttttgtatattatattttttatagttgttttatattttttagatattatgttttggtttttttttgtgtttttttttttgatttttagttttagaagtttttatttatatatttgtaattgtagggatttttttttttgttatgtttagtttattaataagtttttatagatattgttgatttttgttttagtgtttttgatttttagtatttttttgattattttttggaattgttatttgtttatttatattattaatttatttttgtgtgttgttttattatagtaattgtagttgttttaattttataggtattgtaattttaatatttttattatatttgatattgattttgatgtttgttttgttttattaagttatgtttttgttttttagtgtgatttttaattttttgttgaaagttaggtatgatgtattgagtgaaagaaatttaatatattgtaatgtgatgataagagtttaggggaagtgaagtattttatagttttatagtaggttttggttttttagtgagtttgtgtttatgaatggtgatttttaataagtgttttttattttattttttttttgtttttaagtgggataagattattgggggggggttagaattgggtattttttttttttaatgtagaagttaaagagagggttggagttgggtatttttttttttttgtatggaaagttagaggtagttaaatttggatatttttttttttttaatttagttaggttgtgataaaaattttgatagtttaggttttaatattataaaataattttttttgagtataggttttattaagaatattatattttgatggagttgagggggagttttttttgatatttattgtgagaattttgtagagttttaggaagtaaaatttataaaagtgtgggagttttttagaattttttttttgtagatttatttgtattgaatttttagaaatttattaattatagtttaggtttttttatttaggtattggtttttatggaggtttttgtttgtgtatttttgttttagtaagttgttttttttgtatggtttgttttttaaattttttaagtagggttatgatttgttgttttatttttttgatagttttgagagtgttgattttttagtttgtttagatttttatttgtttttaggatgaagtgataatttttaagtttttttttgatatgttagattagaaattgaaagttttaagttttatattttgtgtgtgggtatgtttatattttgtttgttttagtgtttttattttatatttttttttttttttttgtttttttgtgagatttttaggtttaatataaagattgtgtttaatttatttaattattttggtttatttgagtattataatgaataattataaaaaaaaatgaagtaaaagaaaaatttattaaagaattgagatatttgagaaaaagaaaggagattagtgttttataaaatttagaaatagattttttaagtgtttttttattgatttatgtgaaaggattttttttaatttaataaattatgtgtttttgtttatagttttaaaattttttgtgtagttaagaatgggtaaataattaggttttattaaaggattaatgtaaagattttttgtaagtaatatttttgttatttaaggaagagataaattttatggtataattttgttaaagtatattaagaataattttgatataaagttttttttttagttaatatgttatgaaagaaagaagataaggggtgatttttattttttaagtgaattattaaatttattaaagaagaaatgagggaaatagaaagaggatttttgtttgagataatggatttgtatgtatgagtagtagaattttgtttaaagtataaggaagggaaaaaaaagttagtttatttggaattttggatattaagagtttttattgtttatttttttttaatttatatgaatggtttattattttaattaataaatattttatttttttttaatatatttatgaaataaatttgaaatgaatagtgtaatatgtgaatgtttagaatattataaaattaaatataaaatttgtttggtaatttttttagtattttaggaaaaaagttgataaaattttaagtagtagaagggggtagtaaaatttaatagaaagttttggaagatttttaagatttttttttattttttttttatgtagattattttttaataaattttagatgttaatagaaattttgtataatagatttatatatttgtttaaaatagatatagaaatattgaatatatgtaaatatgagagttataagttttatatgattaaattttttttttatggtatataatagttatagtatttttttatataaaataggtttagtggttttaatttagtttggtatatttaatatatttttatgattagtattttaaatgtatttatttgttttattttattgttttagaattgttagttatttaataaattatgtaatttttttttttatgtttagatttgtatttttttttaaaattttgtttatttttaaagttttagattttttttgaatttttttttttgattttttaagtatatggaattttttattttattttgttatataagtgatagaatttttattatgggatagatggagtttaatttttttgagtttaaaataatttaaatataattattttttatgttttgttttttttttatttttgtatttaaatttttttttagataatagaataattaatgtttgataaggaagataatgatgatgattattttaaaatgaatttaggattgtaatgtaaaattttagtatttttttatagtatggattttaatatggtttttaatttaaattaatattagtagttttaattataaattttaaattttagtagatgtaatttatttttttaaaatgaaatagaagattgaaattattaaattattaaaaagaaaatgatttatgtttttagttgaaattttatgtaagattttatgtaataaataggagtgttataaatggaatgatgaaatatgattagaggaggagaaaggttttttagatgagatggaattttagttatttgtgttttatgaagaattagatgtgtatattaagtaaaatagttaaaaaaaaaatttttaagtgagttttttatttattttttttttataagatttttataaattgaggtatttggtgtagttttattttaggttttatgttgttatttttttgtaatgttaaggatttaggatataattgaattttttattttttattttttttttggtgtgtgtgtatatatatatgtatatatatatatatatatatatatatatatattttttagtattttatttttatatgtttttttttgagtattatttatgatagatgttaaataaaagtaaagatgaaattttaattgttaaaattttttttttatttaattaattttttatttaattatgttttaaaatgagaatagaaaattagttttaataagtttaggtaattgaaaagtaaatgttatgttgtattttgatttatggttataatttataattttggaaaagtggatagaaaagataaaagagtgaattttaaaatttgaatttattttattagtattttttatgaagggttagtaattaaaataatttatgtattagggagagaaatgttttaaggtatatgttttggatatttagtgtttttgtaaattttggttattgttgttttttttgtttattagaaggtaggaaattttatattggtgatttgtggagtttatattaattatttatagggtaattgtttaggattagtattatgaggagaatttattttttttgtttttttttttaagaaataaggagggggtgaaggtatggagaatagtattttttttgttgaaagtaatttagttataaagataaattatagttatgtatattgaaggtagttattttattttataaaataagagttttttaaaaagttatgtatgtatgtgttgtatatagagtagatatatagtttattaagtgttgttattaaaatataaaatatgttagttttttttaattttatttgttttagtttgttttgatgtgatttttttgattttttaaagatgtatagattagatatggtggtggtggtgggagaggggattttttgtgtttttggattttagggttgtttagatttttggagaggaagttaagtgtttttttgtttttttttggtattttatttaaggtgattagtttagaattggtttttggaagtgtttgggtaaagattgtgaagaagaaaagatatttggtggaaatttgtgtgtttggggtggtggaatttggggaggagagggagggattagataggagagtggggattattttttttgtttttaaattggggtagttttttgggtttttgatttttttatttttgtgggtaaaaaattttgtttttattgggtttatgtaatttttttaaggggagaggagggaaaaatttgtggggggtatgaaaaggtggaaagaaatagttattttgttatatgggtttggtttttagttttataaaaaggaaggtttttttggttagtgattaattgttatatgatttgtagtgagtgttaggagtatgtttaggaattttttagtagtgttttttttagttttatagttagatgtttttagatagtaaagtttatttttgtgttgtgttttgtttgttgttgtgatgtttgtttgtgttttgttgttgtgtgtggttttggtgtttagttatataggtgagtatttggtgttgtgtattggggattttggttttatgtatttgggtagagtttttgttttgattttttgggtttattttagtattttgatttttttttgaatagagaagttatgtgatttgggaaagagtttggattgttagagtttgaaagaattttgtggatattttagtttttttataagtattgattattatgagttagttatttaattgatttgagatatttttattttttaaatagggatagatgatattaatttgtaggttgttattatgataagataggatttgattaatatatgtgaattgtttatatttggaatttttttattgagtggaagaagttgttttaaatattttagttagtttttttttgtttttaggaaagtttggattatgttttaagataagtaaaatgttttaaaagtaagttgttttattttgaatttttttttaaatgttgattagtgtattagatttattttaatttggaaagtgaagtgttatttatttgaattttttaaaaatgttaattttaatatttaaagagttaattaagaaaagtttagtaatatgatgtattaagttgaatatgttgttatttttatttagaatagaaaattggtatttttatgttttatttattttaaggtaggttaaaaaattgtatttttatgattatttatatattttttgaatttattattgtaaagttgatttatagttaaataattaaatgtttaaattaagattaagatattagagaatgatttatttgttgttttttaattgtagt

SEQ ID NO: 364 - DNA, 5987 bp, Artificial Sequence
  chemically treated genomic DNA (Homo sapiens)
gttgtaattaaaggatagtaaataaattattttttagtgttttaattttaatttaaatatttaattgtttgattatgaattaattttataataataaatttaagaaatatataggtagttatggaaatataattttttaatttgttttagaatggataaaatgtagaaatattaattttttattttaaataaggataatagtatatttaatttggtatattatgttattaagttttttttagttaattttttagatgttaaaattagtatttttaagaagtttaaataagtagtattttattttttaaattaaaatggatttagtatattaattaatatttagggaaaaatttaaagtaaaatagtttatttttaagatattttgtttattttaaaatataatttgggtttttttgggagtaggaaagaattgattagaatatttaaaataattttttttatttaataaaaaggttttaaatataaataatttatatatattgattagattttgttttattataatgataatttgtaaattagtattatttatttttatttaggaggtgagagtgttttagattggttaagtaattggtttataatgattagtgtttgtgggaaagttggaatatttatggagtttttttgaattttagtggtttaagtttttttttaagttatgtagtttttttatttggagagaagttggagtattgggatagatttaggaggttagagtggaaattttgtttgggtgtgtggaattggagtttttggtgtgtggtgttaggtatttatttgtatggttgagtgttaggattgtgtatagtagtagggtgtgggtgagtattgtagtggtgggtagggtgtggtgtgggggtaggttttgttgtttgagggtgtttggttgtggagttgaaggaggtgttgttgaggagtttttggatgtgtttttgatgtttattgtaagttgtatgataattggttgttaattgagagaatttttttttttataagattgaaaattaagtttatgtgatgaaatgattgtttttttttgtttttttgtattttttataaattttttttttttttttttttaaaaaaattgtgtaagtttggtgggggtagggttttttatttatggaaatgagaaaattggaaatttaggaagttgttttaatttgggagtagagggggtagtttttatttttttgtttgattttttttttttttttttgagttttattgttttaggtgtataggtttttgttagatgtttttttttttttgtagtttttgtttgagtgtttttgagagttagttttggattgattgttttggatgggatattgggggagggtagaaggatatttggttttttttttaggaatttgagtggttttgaggtttgggggtgtagggaatttttttttttgttgttgttgttgtgtttggtttgtatgtttttagagggttgaggaagttatgttgggatagattggggtgagtaaggttaagaaaggttgatatgttttatgttttagtgatgatgtttaataggttgtatatttgttttatatgtagtatatatatatatagttttttaaaaaatttttattttgtggaatgaaatagttatttttagtgtatatagttgtaatttatttttgtagttaagttgtttttaatagaagaaatattgttttttgtatttttattttttttttgttttttggaaagagaggtgggaaaggtaaattttttttataatattggttttaagtagttattttgtaaatagttaatgtgagttttatgggttattaatataaagttttttgttttttgatggataaaggaagtggtgatggttagaatttgtagggatgttaaatgtttaaaatgtatgttttaaggtatttttttttttgatgtgtggattattttggttattagttttttataggagatattggtaaaataaatttgagttttaaagtttatttttttgttttttttgtttatttttttaagattatgagttgtgattatggattaaagtataatatagtatttattttttagttgtttgggtttattggggttaattttttatttttgttttggaatatagttggatgaggaattaattagatggaagggagattttgatagttggaattttatttttgtttttgtttaatatttattatgggtagtgtttagggaggagtatgtgagggtgagatattaaaaaatatatatatgtatatgtgtgtgtgtatatatatatatatatatatatatatattagaaaagaagtggaaaatagaaaatttagttatgttttaagtttttagtattataggaaaatgatagtataaaatttgaaataaaattatattaggtattttaatttgtagaagttttataagaaaaaaataaataagagatttatttggaggttttttttttaattgttttgtttagtgtatatatttgattttttatgagatatggatgattaaaattttattttatttaggaagtttttttttttttttagttatattttattattttatttatggtatttttatttattgtatggaattttatatgaaattttaattaagagtgtggattattttttttttgataatttaataattttaattttttgttttattttaaaggagtaggttgtatttattgaaatttgaagtttatagttagagttattaatgttagtttgggttagaagttatgttagaatttatattgtgagagagtattaaaattttatattataattttgaatttattttgaagtgattattattattgttttttttattagatattaattgttttgttgtttgaaaagagatttggatataaaagtgagggaaaaatagggtataaggaataattatatttagattattttaaatttaaaggaattgaattttatttattttatagtggaaattttgttatttatatagtaggatagagtgaagagttttatgtatttggaaagttaaaaaaaaaagtttaaggagaatttgggattttaaggatgggtagagttttagaaagaagtgtaaatttgagtataaggaaaaaagttatataatttattaaataattgataattttgagataataaaataaaatggataggtatatttgggatgttggttatgggagtgtattaaatgtgttaaattaaattaagattattaaatttgttttatatggaaaagtattgtgattattgtgtattataaaaaaaaggtttgattatgtaaaatttatagtttttatgtttgtatatatttaatgtttttgtgtttattttaggtaaatatatggatttgttgtataaaatttttattagtgtttgaaatttgttgggaaataatttatatgaaaagaaaataaggaagaattttaaaaattttttagagttttttgttgagttttattgtttttttttgttgtttgaaattttgttaattttttttttaagatgttaggaagattgttagatagattttgtgtttaattttataatgttttaaatatttatatgttgtattgtttattttagatttgttttatgaatatgttgaaaagaaatgaaatatttattaattgaagtgataagttatttatgtgagttaaaagaaaatgaataataaagatttttaatgtttaaaattttaaataaattaattttttttttttttttttgtattttgagtagggttttattatttatatatatagatttattattttaggtaagggttttttttttattttttttgttttttttttggtgggtttagtggtttatttagagagtggagattattttttgtttttttttttttatggtatgttggttgaaaaaagagttttgtgttagggttatttttagtatattttggtaaggttatgttatgaagtttattttttttttgagtagtagaaatgttatttatagaagatttttatgttagttttttagtaaagtttgattatttatttatttttagttatataagaagttttgaggttataaatgaaagtatataatttgttaaattaagaaaagtttttttatataagttaatgaagaaatatttaaaaaatttatttttaagttttataaaatattgatttttttttttttttttaaatattttaattttttgatggattttttttttattttatttttttttgtgattgtttattataatatttagatgagttaaagtagttgaatgagttgaatatagtttttgtattggatttagaaattttataaggggataaggaagggaaagagagtgtgaggtgggggtattggagtaggtaggatgtgaatatatttatgtatagaatatgaggtttaggatttttagtttttgatttggtatgttagggaggagtttggaaattgttattttattttaaaaataagtaaaaatttaagtaaattgaaaaattaatatttttagaattgttagagaagtgaggtgataggttataattttatttaaaaaatttgaaagatagattatataagaagaataatttattggagtagaaatgtataggtagaaatttttatgaaaattagtatttgggtaggaaaatttgaattgtaattgatgaatttttggaggtttagtgtagataagtttgtaaaggaaaaattttggaagatttttatatttttgtgagttttgttttttggagttttatgaggtttttgtagtgaatattagagaaaatttttttttagttttattagagtatagtgtttttaataaggtttatatttaagagaaattattttataatattagagtttaaattgttgggatttttgttgtagtttaattgaattagaagaaggaaaatatttaaatttaattgtttttagttttttatataggggaagaaaaatatttaattttagttttttttttagtttttatattggagaagggaaatatttaattttagtttttttttagtgattttgttttatttaaggataggaaaagagtggaatgaaaagtatttgttgaaagttattgtttataggtataggtttattaaaaggttgagatttgttataggattatagaatgttttattttttttgaatttttattgttatattataatgtattgagttttttttatttagtatattatgtttggtttttaataaaaaattagaagttatattaaaagataaaaatatagtttgataagatagagtaagtattagaattaatgttaaatatggtagagatgttgaaattataatatttatgaaattaaaataattgtaattattatgataagataatatataagaataggttggtaatgtaagtagatagatggtaattttaagaaataattagagaaatgttagagattaaaaatattggaatagaagttaataatgtttgtaagggtttattagtagattggatatggtagaggaaagaatttttgtgattgtagatatataaatagagatttttaaaattgagaattaaagaaaaaaatatagaagaaaattaaaatataatatttaagaaatatggggtaattataaaaggtgtaatatatagagaaggaaagaagggaaggagaagagagaaaggaatagaagtaattttttaagtaataatgataagaattatatttgatttttttttagatattatataaagaagaaaagagtggaatgaaatattttattttgaggggaaaaaatttataatttagaattttgtattttataaaattattttttaaaagtgaaggagaaataaggtttttttagataaatgaaaattgaggtattttgtggttagtagatttgttttgtgagaaatgttaaaagaagttattgagataagaaaaatgatataggttagaaa

SEQ ID NO: 365 - DNA, 5683 bp, Artificial Sequence
  chemically treated genomic DNA (Homo sapiens)
atggtaaatatttgaaaaagtttttatgttgaaatttaaattagattatatttaggatgttttataaggtggtattttttattaagatgataaaggataaatattggtggagttagagaggttgtttttaaatatagttttttttattagtaatattgtagtagtttgtatttattgtttagagtatgaaaaagatttttgttaaagatggtttttggggatttattattattatatgttaagagtttgttttttatgtttttatttttttattttgttaattttttttatttttattttttggtttagtgtgagattttattattttttttttttatttttttttttttatatttttggttttttagtaggttaatgtttttgtttttttattggaatttatttattttggttatttttttttttatgaatttgttggattatattttaaagttatttaaaagagggatataaagatataataaaattggaaataatgtttatttttattagtttgtagttaagagtgtgtggaattagggtggttgtaggtaaagagatagggggaagggttgttttatgttatgggtaggatagtaaatggtgtaaattttttggaaagtattttagtaatataggtgaagagtttttataatgtgtttattttatgatttatttttattttttttattttaaaggaataagaagaggtttaattaaagtatgagtgaaaaggttatttaaatatagggaaaggggttgttatgatgtttatggttttaagaaatagaaaataataatttggtttaaataataagtatataattaaagaaatttagaagtaggatttttttaagagttgagagatttagtagtttaaaaatgtgatttgatatatgagttttttttatgtttttgtttttttttttttaatattggttttatattaaatttggttttttagtggttaatagtattaaatagtatttattggtatttttgttggtatttaaaagagatggagaaagtttgattttatatggtttttttttaaaagtaataaaggattttttttggaagtttttagtaaattttgttagatttgaattatatgttaatttttaaattagttattggtagggaagtgggaaaaaggggaggaggtgtttatttttaattaatatgtttatttttgtttattgagattaattttataaaagtattgttttagttttttgaagaggagtataatgtttgtgagttatttattatatttatttattaagagttaagggataattgagtaaaatggtagagttggtaggaaaatggtgagtagttttgtttttttgtgttataattgatttgtatataaagagatttggaaatttaaatataagaattttttttttttaagtttagggttttgggtattttaagtttggtttttgtttgggtatagtggtttatgtttgtaattttagtaatttgggaagttaaggagggtggattatttgaggtgatgagtttgagattagtttggttaatatggtgaaattttaattttattaaaaaatataaaaattagttggatgtagtggtatatgtttggaattttagttatttaggaggttgaggtaggaaaattgtttgaatttgggaggtaaaagttgtagtgagttgagattgtattattgtattttagtttgggagatagagtaagattttattttattttttattaaaaaaaaattttggtttttatatgtgaaaaaataaaagttaatttttaaaaattaaataataaagagtgttaggtgataagttttatgatagagataatgtgtgttttaaaatatatagtataaaatagatggaaaatattttatggagaagggagagtttgaattggtgtttgattgaaggataagaaaaatttgttggtaatttttttttggttttgatttttgatgtagttaaagtaaagtaatttagaattatgatttagggaatatatttagagagaaatgaatttatgatgtttttaatttgaagatgttatgattttagattattttagaatataatgattttttattgttttatatttgtaagaaatgttttattattgaaaatttgtaatatttaaaaaatttttatataaaattatagtttattttgttgttttatgttaaataaataaaatatttttttttaattatgttgttttttttaattatatgtaattttaaaattagttgtaattgatagttttttttttatatttattgttaatgtatttaggttaattttatttttaattagagaaatttagaaaaaggaaattttatggtgaaatgttatatgttttataatttttagtaattaatttttaaggatgataatttggtaaaaaagagaattggattagttttttgaaaggtttattattttggtttatgttaattgattgttttaaaattatagtgtttttaggttgtagagatatatttaaaatggattattgtttttatattaaaggggataggtttttttttttttttttttatttttgttttttttaaagttgtatagaggtatatgaggtttggggaatatttgtagtatatgttggttggtaagaatgtgggtgaatttttgttaaggggtgtagatatttttttttttatgattttttttttttatttagaataattgaagtattatgataagaggaagggttttgtgtttgagataagtagtttttatatttgttagttttttttaataagaaagtttttttttgttattgtataggttatttttttattggtaaagtatgatgaagtttggaaattgttgtttttgttttgttgaaagaagttaagttttaagaaatttgtagaggtatttttataattttttagttatggtagtatgaattttgaaggggtagtgagtgttggtttttattttgtttgtatagttaagtttaggggagataatttttttatataagatgtattttgtttttgtgggttttttgtagtttttaagtttttatttgatttgtatataatgatttagtgggttagaggagtttagagttatgagtggtttatttttttaagaattatttttgattgtttagtattatggagtaagtggaaagaagaaaaaaaaaatttaattattttttgaagagtaagatgaatgttgtagaaggagaaggaaggggagggagatggatgggtgttgattttagaatttttagatttgtttggatgaattattatttatgatttgtgggataagaatttgattttatttattaattagtagaaatttttttttttgttttttaatatttgaaatttaataaatatgtgttttaggaatatattggttattttttagaggtattttatatatatattgagtaattagaaaatattttttttgtaatatatatatatatatatatatatatatattattttgttatataatatttttatgtaagaaaagtgaaattgttgtttgatgaatgtaaatatttggttgtttgtagtagttgggagttttgttaggtttaagtgttaagatgggaggtgaattttaggggtttttttttgtttgtgttgagatttttatttggttaagtttttatttatgttttggttttggagtgagtttgatagtgttggattatagtagagggagtgaggtggttgatgttttattttgaagagatgaatggaattttaggaagttagagttatgttggtttgggatagtggtttggagattagattttaatgatagaagtattaggtagtggtatttatggtaatgtgtgtatttatagaaatgtaatttatattttgggtttaggagttgaaaaatgaaaagaatgtttagggaggaaaaagggaaatataataataggtagagagtaatttattattttatgggtttgttttgtaaatagttgaagattttggagttagatggttttgtaaattttttaaataggagttatgttaagaagtatgagtgggtataaaaattgttttttaagatataattttaatttggtttgtggaaattggatatgagtaagtttttttaaaatttgagtagaaagtagttgttttttttgggttttttgatgagaatatgtatattgtttttaagtggttggttgagggagtgttgtggtagtgggagaggtgtttttgtgggttttttggtagttgtggtaggaaagggtttgaaggtagtgaaggtgaatgtggtgtattaatttgttggttttgttgatgttgtgtttatttttttttggggtgggtgtggggttagtttaggataggtgtttgggggatgtgtgtttttattttatggggatggtggaggagagttagtgagggtttgaggggtaggtattttaatgaatggtttttttggtgttttttgtgttttgttggtttatttttttttttataaaatgggtttagtttttagtatttattttttgttattaattaggtattttgggagattagtttgtttgaaagtttttgtgttattttgtgggtttttttaggtggtttttttagttttgtttttttttgggatgtttgttgattattttgagtttgtgtggtgtaagagtatgagtgttgagtttgtgtgtgttaaggttgtgtgggtgggtattgatttttttgagaagttttagtgtttttaagttttgatttttgttttttttattttttagttggaaagttgtgtgttaggtagtggggggtggagagaggagtttagattggtttttattttttgttttttgtttggttgttgtttattggttggaggaatttttaggaatgtgagtgtttttttaaaagtgtgtggtttttttgttttgttagttgttgtgtttgagttggtttgtgagtttagggtttttgttgttttttaggagtaatttttattttggatgtataggtattttttgtgtttttttagtttttgttgtttttgttattgtttttggttgttgtgttttggtatatataggtaagttgtttttggtggttgttgaggattaaagttgtttgggatatttatttggagtgttgaggttttagtttttttggtggattttggaatttatattttttttgtttgtttattttagtttgttttttttagttgttggaggattttttagggtaaggttttagagttattttttttagttttgaggtttataaattaatttattaggatattttaagatttttttattttttgaagttttttttaagtttttgtattagtattttagggaagagtttgtattttttttgttttttttgtaattttaaattatagtttttgattttgtttatttttgattttttaaaagtttttaaattgttggttttgtgttttttatattttaaaattagtattttttttttttattttttttttttttttttttttttttttttatgttttttggaaagtaattttgttgttttttattttagtaaatgtggggttaaagagggatggttttggttttgtttttatgtttagttttgtttttgtgtattgtttttttttgtttagttgatttttgatttttggtttttgtgttttttgttatagg

SEQ ID NO: 366 - DNA, 5683 bp, Artificial Sequence
  chemically treated genomic DNA (Homo sapiens)
tttgtagtaggaagtataagagttgagggttagagattagttaggtagggagggatggtgtgtagaaatggggttgggtatggggatagggttgggattatttttttttgattttgtgtttgttgaaatgaaggataataggattattttttagagagtatgagagagagagagagagagagagagagaggtggaggaaagagatgttggttttaaagtgtggggggtgtaagattaataatttgggggtttttgggaagttgaaggtgagtaagattaggaattgtagtttggggttgtagggagggtaggggaagtatagatttttttttggagtgttgatataaaggtttaaggaggattttagagagtaaggaaattttggggtgttttgatgagttggtttgtgaattttaaggttggagaggatggttttggagttttgttttgaagagttttttagtggttgagaggagtgggttggggtaggtgagtggggagagtgtaggttttggggtttattagagggattgaagttttagtgttttaggtggatgttttgggtagttttggtttttggtggttgttgggggtgatttatttgtgtgtattggagtgtggtggttgggagtggtggtgagggtggtgagggttggaggggtgtggggaatgtttgtgtgtttggagtagaggttgtttttggagagtgataggagttttgaatttgtaggttagtttgggtgtagtggttggtaaggtggaggagttgtgtgtttttaaaggggtgtttgtatttttggggatttttttggttaatgggtggtggttgggtaggaagtgggaggtgggggttagtttgggtttttttttttgttttttgttgtttggtgtgtaattttttagttagaaagtgaagggggtgggggttggggtttgggagtattagaattttttagaaaagttggtgtttgtttatgtagttttggtgtgtatgggtttggtgtttgtatttttgtgttatgtgggtttggggtgattagtaagtattttgaaaagggatggggttggggagattatttaggagggtttgtggggtggtgtaggggtttttgggtgagttgattttttggaatgtttggttgatggtgagaggtggatattagagattgggtttgttttgtaaaaagaaaaatgggttgatggggtgtaggggatattaagagagttatttgttaaagtatttgttttttgggtttttgttgatttttttttattgtttttgtggggtgaggatatgtgttttttgagtgtttgttttgagttggttttatgtttgttttggagggaggtgagtgtggtgttggtggggttggtaggttggtgtgttgtgtttgtttttgttgtttttgggtttttttttgttgtggttgttagggggtttatagagatgttttttttgttgttgtggtgtttttttggttggttgtttgggggtggtgtgtgtatttttattaaggggtttggggaggatagttgttttttatttgaattttaaggaaatttatttgtatttagtttttataagttaaattgaaattgtgttttgaaaaatagtttttgtgtttatttgtgttttttaatgtgatttttgtttggagaatttgtagaattatttggttttagagtttttagttatttatagagtagatttatagagtaataaattattttttgtttattattgtattttttttttttttttttaaatgttttttttattttttggtttttgaatttgaggtgtgggttatatttttgtgggtgtatatattgttatgagtgttgttgtttagtgtttttgttattgaagtttggtttttaagttattgttttaagttagtatgattttagttttttggaattttatttatttttttgggatgggatgttagttgttttgttttttttgttgtgatttagtgttattgggtttgttttgaggttagggtataggtagaagtttgattaaataaggattttagtatgggtagggggaaatttttggggtttattttttattttagtatttaaatttggtaggatttttgattgttgtaaatagttaagtgtttatatttattaaatagtagttttgttttttttgtgtgggagtgttgtatgataagatggtgtgtgtgtgtgtgtgtgtgtgtgtgtattatggaaagagtgttttttagttatttaatatgtatataaaatgtttttaaaagatgattggtatgtttttaaggtatatgtttgttggattttagatgttgggaggtagaaagaaaagtttttattggttgatgaataaaattagatttttgttttgtaaattataggtaatgatttatttaagtagatttgaagattttggaattggtatttatttatttttttttttttttttttttttttatagtatttattttgttttttgaaaagtaattgggtttttttttttttttttttatttgttttatgatattggatagttagaaatagtttttggagggatgggttgtttatggttttgggtttttttggtttattggattattgtgtataaattagatgggggtttgagggttgtaagaggtttataaaagtagaatgtattttgtatgaaaagattattttttttaggtttagttgtgtagatagagtagaaattagtatttattgtttttttaggatttatgttgttatggttgagggattgtaggaatgtttttgtagattttttggaatttggttttttttaataaaataaggataatagtttttaaattttattatgttttattaataagaaggtgatttatatggtggtaggaaagagtttttttattagagaaagttgataggtataggagttgtttattttaaatataaagtttttttttttattatgatattttagttgttttgggtggaaaggaaaggttatagaagagggagtgtttgtgttttttaataggaatttatttatatttttgttagttaatatgtgttgtaaatattttttaaattttatatatttttgtgtagttttgagagaagtagggatgggaaaagggaaaagaaaatttattttttttaatgtgagggtaatagtttattttgagtgtgtttttataatttggaagtattgtgattttaaggtaattaattaatatgggttgaagtgatggattttttagggagttggtttagtttttttttttgttaagttgttatttttgaggattagttattgaaaattgtaaggtatatggtattttattgtaggattttttttttttaagtttttttaattggaggtgggattgatttaaatatattggtagtaagtgtgaggaaagggttgttagttatagttagttttaaaattgtgtgtaattaaggagagtaatataattgagaaaaaatattttgtttatttagtatagaatagtaaggtgggttgtgattttgtgtaggaattttttaagtgttgtaaatttttagtagtggaatattttttataagtgtgaagtaatgaaaaattattgtattttagaatagtttaaaattatagtatttttaaattgaagatattataaatttatttttttttgaatatgttttttagattataattttaagttgttttattttaattgtattagaggttagagttaggaggaagttattaatagattttttttgttttttaattaaatattaatttaagtttttttttttttatgaggtgttttttatttgttttatgttgtgtgttttaaagtatatattatttttattataaaatttattatttaatattttttattatttagtttttaaaaattagtttttatttttttatatgtaaagattagaatttttttttggtggggggtgggatggagttttgttttgttttttaggttggagtgtagtggtataattttagtttattgtaatttttgttttttagatttaagtgatttttttgttttagttttttgagtagttgggattttaggtgtgtgttattatatttaattaatttttgtattttttagtagagttggggttttgttatgttggttaggttggttttaaatttattattttaggtgatttattttttttggttttttaaattgttgagattataggtgtgagttattgtgtttaggtaaggattagatttgaagtgtttaaagttttgggtttgggaagagagagtttttatgtttaaatttttaaatttttttgtgtataagttaattatggtatagaaggatgggattatttattatttttttattagttttattattttatttagttattttttagtttttggtgggtaaatgtggtgagtgatttataaatattgtatttttttttaaagaattgaagtaatatttttatggaattgattttagtgggtaggggtaggtatattggttaagggtaaatattttttttttttttttttatttttttgttagtgattgatttaggaattggtatgtgatttaaatttgatgaggtttgttgaaggtttttgggaaaagttttttgttgtttttaaggaagagttatgtgaaattaggttttttttattttttttggatattaataagaatgttgataagtgttgtttggtgttattggttattggggagttaagtttagtgtgaaattagtgttggaggaggaagaataaaagtatagaaagaatttgtatgttaggttatatttttgagttgttaaattttttaatttttaagggaattttatttttagatttttttggttatgtgtttattatttaagttaagttgttgttttttattttttagaattgtagatattataatggtttttttttttgtgtttggatggtttttttatttatgttttgattaaatttttttttatttttttagaataagagaagtaaggataggttataggataaatatattgtaaaggttttttatttatattattaagatgttttttagaaaatttgtattatttattgttttgtttatggtatgaggtagtttttttttttatttttttgtttgtagttattttagttttatatatttttaattgtaggttggtaagggtgagtgttatttttgattttattgtgtttttgtattttttttttgggtaattttgagatgtagtttagtaggtttataaagaaaagaataattaggatggatggattttagtgaaggggtaggggtattgatttgttaggaaattaagggtatggaggaaagaagatgggaaaaggagatggtgaggttttatattgggttgaaagatggaaatggggaagattagtaaggtaggaaggtgaggatatggagaataggtttttaatatgtaataatgataaatttttaaaagttgtttttggtaaaagttttttttatattttggatgataggtgtaggttattgtagtgttgttgatggggaggattgtatttgggagtagtttttttggttttattaatgtttattttttattattttagtaaaaaatgttattttatggggtattttaaatatggtttggtttgggttttagtgtggaagtttttttaagtgtttgttat

SEQ ID NO: 367 - DNA, 7833 bp, Artificial Sequence
  chemically treated genomic DNA (Homo sapiens)
gtttttggtgagatatgtgttttataagttttaatggagaaaaatgtaagtattttattttttgaaatttggttatttgagtaatgagaaaatagttattttttttaggatagtggtttttaattatggttatgtgtttttttaggaaaattttaaaaatatatatatattaatgtttttgtgttatttttagggattttaagtttttgaatatgaattttgtattagtattttttaattatttaggtgattgtgatgtgaaattatgattgagttttattgttttaagatgaaataaattttttttagtattgaaattataaatttaaattattaaaattaattaagggtatgggaattaataaggtatagggaagtttttatattataaaattatttttttaaattatagtttattgtttatatgttatttgttattgtagaaaagggtgaaaaaatagtaaatttaattatttttagtttgaaaaattatttagaaatgaagatgatgattttgaaatattgttaatattatttgatttataaataatgttttaatatatttattatatattgatagatatttttttatatgaatattatatattaaaattaaggtaataatgtatttagaatattttatttatatttatgtattttaagtaggttagaaattaagatatgagttattaagtatgagatgttaaggtgtggggttagaaattatattgtattttattattaataattaatatatattttaatattatatatatttaattttaatttgtatatttttaattatttttaattatgtgtataaatataagtatatatatttttatgtatttatttatttatatttttatttatttatttatataggggatttttttaaatttattattattaaattatatatttttattttaatttttagaataagtttaggaggtaggtattgttattatttatattttataaatgaggaaattgtttatagttataaagttattgtgttagatatattagaagtttaatatatatttggtgaatatatgtataaaaatagagagatagatatgtataatagtttatttttatattgagtaaaagtttttaatttgttttagaaatttttttgtgaaaattgagtaaaaattgaggtatttttttatttgttatataggtataggtggtattttatttttttaataaggatgaatattgaaatgtggattttaaggtttaattttagattttttgaatttttgatagtgggatttggaatttgtttattgttttaaagttttttaaggaatttatatgattaattaggtttagaaattattggattttattgttgaagtttgagaattaaagtttgggttttattgtggttttatagaaagggtaaatgaagtattatggatagaattgatatgtttttagttagtttttttttttagaagttaataggtagtaatatagtagaaattagtgatttatgttttgtgttttgaagttaggtagaattttatagagttttagtagtgttattgatgagatttgttttttggggtaagttgtttgatgtttttaaagttatattttttttatataaaatgagataatattttttgttttataggggtgttttaaagattaaataaaaataatatgttttattttatatggtataatgtttgatatttaagaagtaaaggatatattttatttttattgaagtaattagaaagtatgaaattatgaaggagataagagttttgattggtagtgtattttatttttttaggtttatttatttattttaaattatttttgttggagaataatttttaagttttttatttaagttgtgagtaattttatattttataatgatgttttttttatgagaaaaaaaaatgtttttaagttttttggagaaaatatatttgtattatttttattgaaaaatttaataattggattttgtttttttgtattaattttagagtgtatatgttataaataaagtgttttagtttaagaagattgaaagtaaatatggtatagtattttaaaataagaattttgtaaatatatggtatgattgtgttatattattagtaattatatgatatgtaatgtaaagtatagtttatagatttaaatttaattttaataagtaaattgattttgttttgttggggaaaagttaaagtattaatttaattgttaatgtagttttgtttatttttttggtatttagtgataagtttaaataatgtatatatttttatttatatatttagtaatataattttttgtttaatgagtgatgtttttttgttatttggtggtgtttgttagttttagaatttgttttttggtggtattataatattaagtatagagtaagtgtaataaaattgtagtatttttattgaaaaggttttgttttaaattgtttaataatttaaaggatttttgtggaagtaattgtatttgttaattagttataattagtaattaatttttttggagttttaatttatttttggtaaaatgttttaggaagagtatatattattagaaagtatgttaaaaatttatttagtagaaaatttaaaaatagtttttttttgttaagaggttttttaaaattttatttatatagttaaattttgaaattttagtaggttttgttttattattataattattgtataaatatttttaaggattttgtttttagttttaagtatgatttatttttataagtttgattagttattatattagttttgttatggaaaatgatatgtttttattttttgttgtagagttgttaaattttgatttatatttatgttgttttttttgttgaaagtttgtagtgaaagaaatttttaattttttgttttgtaatattagttggtagttttatttaatgggtattttgtttttttaaagaatttagttgttttgtttagaagttgattttttgatgtttttaatgtttggtttaattgatttgttttaatggagtttttgttggtgaggagtgagatgttattgattagaatgttgggatttgttgtttaattgttaggagtgagagatattgagatttagaaatttttggaggtgggaggggagagggatagttttggatggaggtggagatgtaagataaagggatggattttatataggaaaaaaaaaaagattttgttgaggtattgaggtgttgtatgattatattttttaaaggagaagttaaaaagtaaggaagtgggaggaggttggaggttaaagtatttaaaaggattatttgggtataatttgtttttttgttggtgtttgtaaaggatagatagttttgtttttaaagtatatgaatgttttttttaagtgattgggaatggatattaattgtttgttaaatgttattaaatgtttttttaaatttaggggatatagaaagaggggtataaaaggagaatttaaatagaaaaagggaggatttggaggtttttgaaagtggggggagaagaaggaggagggataatagagaggaatagagaaggagagtggagagaagataaataaaaataaaaataggaattattgaataattatatattaaaaagaaagtttttttttatggggtatttaaaatattgagattgtaatagtgattttggttatggaagaaagatgtttttttttatttttgtttttgaaagtttttggttttgttattggtgattaaaattttattaggttaaagagtgtgtttaattgtttgaagaatgtagtagatggaaggtgggttttgttatgttgtttgttttttttgttggagagaatgaaagaaatgtgtagagttagagatttttgttgagttagatttttttttgttgttttaggttattggttatttggtaaagatttgagtaaggaatgtagggttattgtttgggttaataaatggagtttgtttttttttttttggatgttgttgtttggttgatgtttttggtaatttatttgtggtgtatgtagaggagttttttttttttttttagattatttgttttgattaatttgattttttaaatatatttgattgtattttttaggtggatatattaataggttatgggttggagaggagtgggtgatgaggagagggatttaaatttgtgaatgtttgggttgggttggagttgtggggggtttgggaggagagaggggagaagagagaaggaaggagagtgtttgttgggatggttgagttgttttggtgagtagttttggggttgtatgtttttgtgggagatgttgttgttgtttttaggttggtaagagtggttttaatattattgttttttatttttttttttgtaaatttttagagaaatgtttttggtttttttgttgtgatatttttagtttgtatttttttatagtttaggtggtgtgtttttgtatgttggagtgttggttgttagtaggatgtttttttttgtgttgatttgtttttttttgttttgttgttgttgtttttttgatatttttgtttttattatttttagtttggagagatgttatttagttgtggtttgtatttgtggtttggggttatgtgtggaagaggggtgttagtttggattttgtttttggtagggggtgttttggagtggagagtgaggtgaatggtatatgagtgtgtgggtagtttattttgaagtttgagttttttatttgagttatgttttgtttagttttatttgggttagtgtttggtgagtgagtttatttgtggtttttgtggttgttttttttttgtatttttgtatttatttgttgattttttttttttgggatttgtattttgttttattaattagagtttgattgtttttttttatgtgattttgggtgggttgaggatttgttgttttttaaatgttagagggatgtgggtggtagagtttgagaggtggttgttgggttgtggggtgttttgattttttttttattttgtttttttgggttttatttgtttgtttttggatttttgtttttttttgttttttggttttttagagttttttttttatggtagtagttttttgtgtttttggtgtagttttttagtggatgatttttttgttttggggttgagtttagtttttggatgttgttgaaatttttgagattatgtgtgggtttggttgttgtttttttgttgggtgttattgttattgttgttgtttttgttgttgttgtttgtgggatgtttagtagtttgttgtttggtttttgtgattttgtgttttttggaagttgtttgttgttgtagagttgtatgaattagttatggtgttgtgggagtttttgtggtagtgtagtagttggatattttgtgagggtttttgttggttgttgttgttgtttgttatgttatttattgtagtttgtttggtgaagtttgttgttttttttatttttttaagtgattgttaaatgtttattggttggaattgttttggtaagtttagaatttttgtttttgattttttaattttgtagaagaatatgtgtatttagtatagattagtttattttagtgtgtttttttagttttttattttttattgttttagatttttaatattatttatttttatttagagaaataaggggaattgttgtaggtttgggggtgaggggtggttttgggatgggtagaaagtgtaggtgtagtaggaaatttttgtatgtttgtgtttatattggagttgtgaggattttgagaaatattaaatgggatggttttttgggtttattgttttgaaagagtattaattttaggggaaatattgaaatagaagttttgttattattaaagaaaaaagttttattaggatgaggaagaaataattttatgagaaagaatgagtgagaaagtaataaattaaatggtgattgtaggggaattgttgatttttggtaaaggtgttatgaggttgtattggttttttgttgaagattaggttatatagattttagaggagttgggttttaatagaatttttttttttttttttttttttttttttttttttttttttttttttttatttatttattttttttttttttttattttttttttttttaggtggtaaaagatattggttttgtagtttagatatgtttttttttttgtttttttaagttttaaggtagtataggggagttgagaaaaagaatattttgtgggttttttaggttggagtgggtatgattgaggttggttaggttttatgtaggtgagttgagggtggaattgattttagtgggtgttgatttttttatttttggataggtttttgtggagtgggttaggtattttttttgtttgtttgggtttttttagattttgatggtgaatgtttggtaggttttgttttgttgaagttttttaattaaatagggttagaggatgggagttgttgtatttttagttggtatagtatttggtttgatagtttgtagtatagggtgtatgtaattttttattttttgtgaatataattttgttgtagttaaatttggttttgaataaagtgttttttaaagatgtatataagttgaagtgtatgtaattttagagaggagggaatgattaattgtaatttagggtgaaagtttgtatagtttttagttattattgatgtaaatgttaaaaggaaaattattatgtattattttaatttattttttataaagataagttgagatatgtaattttattagatttgggttaatagattgtttttttttttggtagtttttaaatttggtattttaataaaatttaatatgtttttataattttttgatttatgtgtatatgtgtgttgtttttgaaagaataagttttattttgttattgtttaattattttttagatgttttattatggtaataattatgagtttgtaaaaataatttttggaaatgttgatggttttgtagtttaatatagattggtttgttttatttttagtttttgtattgttttaggaaataattaatttaaatgtgaagttgatatttgtaattaagaaattatatatttattagatattttaaaggggattgtataaattaaagagaataaattggttttgtagataggttgttaagaatttggtattttgtttttatttttgttaatttagaggtgattaatttttatttgagttaaatagattattatagaaaatattgtgtttgtttatttttattattgaggttttgttttttttttgtttggatatattttaaataaggggttgttttagttgttgaagtaaaagaataattaaagatggggaaatggtaaaagggtatttagagattattattagtttttttttaaaatgtggagttttgtggttataaatattgtttatttaatgagtaaaaaataaaaataaaaaaaaaataggaagtaaatgttaagtttttatttattattgttagtattaatgtaagttttaaaaaatagtattattagaaaaggatattaaaggagaattgattagaaaagaattgtggaaaatggaaatgaatattgattatttaattagattttgaggttattagtagatagtgattttgtagtatagttatagttgttggatttaaaatttaggataagtattttaaagttttaaagtagtgtttttttttgttaaaaatttgtaagatgttttaatgattggagtgttttttttgaatttgagg

SEQ ID NO: 368 - DNA, 7833 bp, Artificial Sequence
  chemically treated genomic DNA (Homo sapiens)
ttttaaatttaaagagaatattttagttattaaaatattttatagatttttaataaaaaaaagtattattttgaagttttaaaatatttgttttaaattttaaatttaataattatagttgtattgtaaggttattgtttattgataattttaaaatttagttaagtgattaatatttgtttttattttttataatttttttttagttaatttttttttagtatttttttttgatagtgttattttttaaagtttgtgttaatattgatagtggtgaatgaaagtttaatatttgttttttgttttttttttatttttattttttgtttattaggtggataatatttatgattataaaattttatattttggaaaagagttagtgatgatttttgaatatttttttattatttttttatttttaattgtttttttgttttaatgattgaaataattttttatttgaaatgtatttagataaagaggaaataaagttttaataataaagataaataggtatagtgttttttgtgatggtttgtttggtttaaatgaagattgattatttttaagttaataggggtggaagtggggtgttaagtttttgataatttatttgtaaaattagtttattttttttagtttatgtagttttttttaaaatatttggtaaatatgtaattttttgattgtaaatgttaattttatatttaagttagttattttttaaaataatgtaagggttaggaatgaagtaaattagtttgtgttggattataaagttattaatatttttaaaaattgtttttgtaggtttataattattattataataaagtatttaaaaagtgattaggtaatagtaaagtgaaatttatttttttaaaaataatatatatgtatgtatgaattaagaagttatagaaatatgttgagttttattaaaatgttaaatttagaaattgttaaaaaagagaataatttattgatttaaatttaatagggttgtatattttaatttgtttttgtaaaggataaattagaatgatgtataataattttttttttggtatttatattagtaataattaggaattatataggtttttattttgagttatagttggttatttttttttttttaaagttatatatattttagtttatatatatttttgaaagatattttatttagagttagatttaattatagtaaaattatatttatagaagatgaaaaattatatatattttatattataggttgttaaattgaatgttatgttagttaggagtgtagtaatttttattttttggttttatttaattaggaagttttagtagagtgaagtttgttaagtgtttgttgttagaatttgaaggaatttgagtgagtaagaagagtgtttgatttattttatagaagtttgtttagaaatggaggagttagtgtttattgaagttggttttgtttttggtttgtttatatggagtttgattagttttagttatgtttattttggtttgggagatttgtaaagtgtttttttttttaatttttttgtattattttgaagtttagggaagtaaagagaggggtatatttggattgtaaaattaatgttttttgttgtttaggagagaagggaatgagagagagagagagatagatagatagagagagagagagagagagagagagagagagagagagagagagagaaattttattgaaatttagtttttttagaatttgtgtgatttggtttttaatgggagattagtgtgattttatggtatttttgttaggaattagtgatttttttgtagttattatttgatttattgtttttttgtttatttttttttataaagttattttttttttattttagtaagatttttttttttaatgatgataaagtttttgttttagtgttttttttaggattggtgtttttttaaaatagtgaatttagaaaattattttgtttaatattttttaaaatttttgtagttttaatgtaagtgtaagtatgtaaaggttttttgttatatttgtattttttgtttattttagaattattttttatttttgggtttgtaatagttttttttgtttttttggatagaggtgggtggtattaggggtttagggtagtaggaggtgaggggttgaggaggtgtgttagggtaggttggtttgtgttggatatgtgtgtttttttgtggagttaaagggttggggatgggggttttggatttattagagtaattttagttggtgggtgtttggtagttatttaaggaggtagggaaagtagtgagttttattgggtgggttatgatgagtagtatgatgggtagtagtagtagttagtaaaagtttttgtaaagtgtttagttgttgtattgttgtggggatttttatagtattatgattagtttgtgtaattttgtagtagtaaatggtttttgaggaatataggattgtgggggttgggtagtgggttattgagtattttgtggatggtggtagtagaggtggtggtggtggtagtggtatttggtggggaagtagtagttaaatttgtgtatgattttgagagttttagtaatatttagggattgggtttagttttggagtgagagggttgtttgttgagaagttgtgttggagatgtgggaagttgttgttataaggagggagttttgggaagttggaggataggaggagatgggagtttaggggtagatgagtggagtttgaggaggtagggtggagggagagttaaggtgttttgtagtttggtagttgttttttgagttttgttgtttgtatttttttggtgtttgggaagtagtaggtttttagtttgtttggggttatgtgggaagaggtagttgggttttgattggtggagtaggatgtaggttttgggagggaggggttgatgagtaggtgtaaggatgtaaggaggaggtggttgtggaagttatagatgggtttgtttgttaggtgttggtttgagtggggttaggtggggtatggtttaaatgagaagtttgggttttagggtgggttatttgtatatttatatattatttgttttattttttgttttaggatgttttttattgaaggtggggtttggattagtgttttttttttgtgtgtgattttgggttgtgagtgtgggttgtggttgggtggtgtttttttgagttggagatggtgggggtggaggtgttagaggagtagtagtagtagggtagagaggggtgagttggtgtgggagagggtgttttgttggtgattggtgttttagtgtgtgggagtgtgttgtttaggttgtagggggatgtaggttgggaatgttgtggtggagaggttagggatgtttttttagggatttataggaaagagggtgagaggtgatggtgttagaattgtttttgttgatttggaagtaatagtagtattttttataagagtgtgtaattttaaggttgtttgttgaggtagtttagttattttggtaggtgttttttttttttttttttttttttttttttttttttaggttttttgtagttttgatttagtttaagtgtttgtaggtttgaatttttttttttattatttgtttttttttagtttgtagtttattagtgtgtttatttgggaggtgtggttagatgtgtttggaaggttagattggttgggataagtggtttgagagaaagagaaaggtttttttgtatatgttgtgggtgggttgttgggagtattggttgggtagtggtgtttgggaaggggagagtgggttttatttgttggtttaggtagtgattttgtgttttttatttgggtttttgttggatggttggtgatttggggtgatgagagaaggtttaatttggtaggagtttttggttttgtgtgttttttttattttttttagtgggaagggtaaatggtatagtgggatttgttttttgtttgttgtattttttaggtagttagatatattttttagtttaatggaattttagttgttagtaatgggattaagagtttttggggataagggtggagaggaatattttttttttatgattggggttattattgtagttttagtgttttggatgttttatagggaagagttttttttttggtgtgtgattatttagtgatttttgtttttgtttttgtttattttttttttgttttttttttttatttttttttgttatttttttttttttttttttttttgtttttaaaagtttttggattttttttttttttatttaaattttttttttgtgtttttttttttgtgttttttgaatttaggagagtatttgataatatttaataggtaattagtgtttatttttaattatttaaaagaggtatttatatattttgaaaatgggattatttattttttgtagatattagtagaaaaataaattgtatttgagtaatttttttaagtattttaatttttaatttttttttatttttttgttttttaattttttttttgagagatgtgattgtgtagtattttagtgttttaatgaaattttttttttttttttgtgtgaaatttatttttttattttatatttttgtttttgtttgagattgtttttttttttttttatttttaaagatttttgaattttagtgttttttatttttggtaattaagtagtagattttagtattttagttggtggtattttgttttttattgatgaagattttattaaaatagattaattagattagatgttggaggtattagaaaattggtttttagatagagtagttaaattttttaaggaaatagaatatttattagatagagttgttaattaatattgtaaaataaggaattagaaattttttttgttataggtttttagtagagaaggtaatataaatatagattaagatttaataattttatagtagagaatgagaatatgttattttttatagtaaggttggtgtggtaattaattaggtttatgaaaataagttatgtttgaaattaaaggtaaagtttttaaaagtgtttatgtagtaattatgataatgaaataggatttgttaggattttagagtttggttatgtaagtagaattttagagaattttttagtagaggaaaattgtttttgaattttttgttaagtaaatttttggtatattttttaataatatatgttttttttaagatgttttgttaaaagtaagttaaaattttaaaggagttaattattggttgtaattggttaataaatgtggttgtttttatagaggttttttaaattattaaatagtttgaagtaaagtttttttaatgggaatgttgtaattttgttgtatttattttgtatttagtgttatagtgttattaagaaataaattttgaaattggtaagtattattaagtggtagaagaatattatttattgagtagagaattgtattattgaatatgtaaataaaaatatatatattatttagatttgttattaggtattaaagaagtagataagattgtattagtaattggattagtgttttaatttttttttagtaaggtaaaattagtttatttattagaattaaatttaagtttatgaattgtattttgtattgtgtattatatgattgttagtaatatgatataattatattatgtatttgtaaaatttttattttaaaatattatattatatttatttttaatttttttgagttagaatattttatttgtggtatatatattttagaattgatgtagaggagtagagtttagttgttagattttttagtagaaatagtgtagatatattttttttagaaaatttaagaatattttttttttttatggaaagaatattattataaagtgtgagattatttatagtttaagtagggggtttgggagttattttttaataagaatagtttaagataaataaatgaatttgggaaaataagatatattgttaattagaatttttattttttttatgattttatattttttgattgttttaataaaggtaagatgtattttttgttttttaggtgttaggtattgtgttatgtaggatagaatatgttatttttatttaatttttaaaatatttttatgagataaagaatattattttattttatataaaaggaatatggttttgaaagtattaggtaatttgttttaagaaataaattttgttagtgatattgttgggattttgtgaaattttgtttgattttagagtataagatataagttattaatttttgttgtattgttgtttgttagtttttgagaggggaaattaattgggaatgtattagttttgtttatgatattttatttgttttttttgtggagttgtagtaaggtttaaattttaatttttaaattttggtaataagatttagtgatttttgaatttggttgattatatgaattttttgagaaattttgaaataatagataaattttaagttttattattagggatttagaaaatttggagttgggttttgggatttatattttaatatttatttttgttggagaagtaaggtattatttatatttatatgataaatgaaaggatattttgatttttgtttagtttttatagagaggtttttgagataggttaaaagtttttatttagtgtaaagatgagttgttgtatatgtttgtttttttgtttttatgtatatgtttattaaatatgtattaagtttttaatatgtttgatatagtaattttgtgattgtagataatttttttatttgtaaaatgtgagtaataataatatttgttttttgggtttgttttaaagattaaaataaaaatgtatggtttaatggtagtggatttggggggattttttatataaataagtgaatggaggtatgaataaataaatatataaagatgtgtgtatttatatttatatatataattaaaaatagttaaagatgtataaattaaagttaaatgtatgtgatattgaagtatatgttgattattgataatgaagtatagtataatttttaattttatattttaatattttatatttaataatttatattttaatttttagtttatttaagatatatagatatagatagaatgttttaaatgtattattgttttagttttaatgtataatatttatatgaaaaagtatttattagtgtgtagtaaatgtattagaatattatttataggttaaatgatattgataatgttttagagttgttatttttatttttggataattttttaaattgagagtaattaaatttgttatttttttatttttttttataatggtaaataatatataaataatgagttgtgatttaaagaaataattttataatgtaaaagtttttttatgttttattgatttttatgtttttaattaattttggtagtttaagtttgtgattttagtgttgaggaaagtttattttattttagagtagtggggtttagttatgattttatattataattatttggataattaaagaatattgatgtagagtttgtatttaaagatttggaatttttagaagtgatatagaagtattggtatatatatatttttaaagtttttttggagaaatatatagttatgattgagaattattgttttggggaaagtgattatttttttattatttaaatagttaagttttaggaggtaaaatatttatatttttttttattaaaatttgtaaaatatatattttattaaagat

SEQ ID NO: 369 - DNA, 2501 bp, Artificial Sequence
  chemically treated genomic DNA (Homo sapiens)
gtaaatttttatattttgaggagagatagggttttattatgttggttaggttggttttaaatttttgattttaggtgatttatttgttttggttttttaaagtgttgggattataggtgtgagttattaagtttgatgggtagtaatttattttttatataattttttttttttttttttggtagagatgaggttttgttatgttgtttaggttggtttaaaattattgggtttaagtgatttgtttatttgggttttttaaagtgtagggattataagtatgaattattatgtttggttgtaattttttatatattttggatattaattttttattagataatatagtttgtaaattttttttttttttattttgtaggttgtttttttattgttggttattttttttgttgtatagttatttttaagtttgttgtaaatttatttgtttattttttgttttgttgtttgtgttttgttgttatatttaagaaattattgttaaatttattgttatgaagtttttttttatgtttttttttaggagtattatagttttaggttttatgtttaatttttaataagttttgtgtttttgtatatggtgtaaggtaagggtttaattttatttttttgtatgtggttatatagtttttttagtattatttgttaaagatataattttttttttatgttttggtgttttaaaaaaaaaaaaaattttggttggttatggtggtttaggtttataattttagtattttgggaggttgaggtaagtggattgtttgaggttaggagttttagattagtttggttaatatggtgaaattttgtttttattattgaagatataaaaattagttaggtgtggtggagtatgtttgtaattttagtttattagggaggttgaggtatgagaattgtttgaatttgggaggtagaggttgtagtgagttaagattttattattgtatgttagttggggtgatagagtgaggtagggttttattttgttgtttaggtaggagtttagtggtttaattatggtttattgtagtttatattgttagggtttaagttatttttttattttagttttttaagtagttaggattataggtgtgtgttattatgtttagtaaatttttgtattttttgtagagatggggtatttttatgttgtttaggttggttttgaatttttaattttaagtgatttttttatttgggttttttaaagtattgggattataggtgtgagttattgtgtttgatatggtgttttttaatttatttttattttttatttttatttttttgagataaggttttgttttgttttttaggttggaatgtagtggtataattatggtttattgtaatttttgtttttttggtttaagtgatttttttgttttaatttttggagtagtttggattatgggtatatgttataatgattagttaatttttgtttttttttttttttttttttttttttttttttttttttttttttgagatgtagtttttttatgttatttaggttggtttaaaatttttgggtttaagtgatttttttattttggttttttaaagtgttgggatgataggtgtgagttatgtggtgtttaaaaaaggtaataaaaaattttttatatattgggtatagaagtggtatgggtttttatatattgtgagatttttggtattagttataaattttgtgtatatttaagattttttagagtaggtgtaattattttgttttatagatgaggatatagaggttgagttgtagtgatttatttaaggttgtatagttagtaaatagatggaggttggattggaattgaggattttatttaagggtttttataaatttttgggggttttttgttgttttatttttattatatttgaaagaatgaatgaatgaatgttttgggtattgtgtttattttttagtaaattgtggagtttggatgagtttattgttttgtgtggggggggtgtgtgtttgttttgtgtatgtgtgttttttgggtatggttggttttgttttatttttttgtatagggtattgtttttttttgtttggtatattttttttttttttatgtttggattggggtggtagatgttgtttttgtttattgtttttttttattggtttttgtgtgaaaagttggggtgtttgtgttgttgttgttgtgtttgttgaagtttttgagatgttggtgtgtattgttttagtttgggtgtttatattggttgttttggttattttgttgtttgatgatgtttgtaggtggtaggtattatgggggggaatatggatttagggggataggtagggtgttgggtggggggttgtttttttttggggtggttggtggttgttgttgatagatgggtgtgtatgtgtggggtggtgtggtgtgtagtggtagttggtgtgggtagggtggtatttttggttgtgtgtgtttgggttg

SEQ ID NO: 370 - DNA, 2501 bp, Artificial Sequence
  chemically treated genomic DNA (Homo sapiens)
tagtttgggtatgtgtgattggaagtgttattttgtttgtgttaattgttgttgtgtgttgtattattttatgtatgtgtgtttgtttgttagtagtggttattggttattttgaggggaagtgattttttatttagtgttttgtttgtttttttgagtttgtgtttttttttatggtatttattgtttgtggatattgttgggtagtgagatggttgggatggttagtgtgggtatttgggttggggtggtatgtgttggtattttggaggttttagtagatgtggtggtggtagtgtaggtgttttggttttttgtgtggaaattgatggggaggggtgatgagtggaggtggtgtttattattttagtttgggtgtgggggaggaggggatgtattaaatggagagaggtgatattttgtgtagaaggatggaatggagttggttatgtttagggaatatgtatgtgtaaggtgggtatatattttttttatgtggagtagtgggtttgtttaagttttatggtttgttgggaggtgggtatggtgtttgaggtatttatttatttatttttttaggtgtgatggggataaagtagtgagaagtttttaagggtttgtgagagtttttgagtaaagtttttagttttaatttaatttttatttatttgttggttatatgattttaggtgggttattatggtttagtttttgtgtttttatttgtaaaatggggtaattgtatttattttagaaaattttgagtatatatagaatttgtagttagtattaagaattttatagtgtatagaggtttatgttatttttatatttagtgtgtggggggttttttgttgttttttttaagtattatgtggtttatgtttgttattttagtattttgggaggttagggtgggaggattgtttgagtttaggagttttagattagtttaggtaatatagagaaattgtattttaaaaaaaaaaaaaaagaaagaaagaaagaaagaaaaaaagaaaaataaaaattagttagttgttgtggtatgtgtttatagtttaaattattttagaggttgaggtaggaagattatttgaattggagaggtagaggttgtagtgagttatgattgtattattatattttagtttgggagatagagtaagattttgttttaaaaaaataaaaataaaaagtaagaataaattaagaagtattatgttaggtgtagtggtttatgtttgtaattttagtgttttgagaggtttaggtgggaggattgtttgaggttaggagtttaagattagtttgagtaatatagggatattttatttttataaaaaatataaagatttgttgggtatggtgatatatatttgtaattttagttatttgggaggttgaggtgggaggatggtttgaattttggtagtgtaggttgtaatgagttatgattgggttattggatttttgtttgggtgatagggtaagattttgttttattttgttattttggttggtgtgtagtggtgagattttggtttattgtaatttttgttttttaggtttaagtgatttttatgttttagtttttttagtaggttgggattataggtgtattttattatgtttggttaatttttgtatttttggtggtagagatagggttttattatgttggttaggttagtttgggatttttagttttaagtagtttatttgttttagttttttaaagtgttgggattataggtttaagttattgtaattagttagaattttttttttttttaaagtattagaatatgggggaaagattgtgtttttaataaatggtgttgagaaaattgtataattatatataaaagaatgaagttggatttttattttatattatatataaaaatataaaatttattaaagattaaatataagatttgaaattatagtgtttttagaagaaaatatggggaaaagttttatgataatggatttggtaatgattttttggatatgatagtaaaatataggtaataagataaaagatagataaatgggtttgtaataaatttaaggatagttatatagtaaaagaaatgattaatagtgaaaaggtaatttatagaatggggaaaaaaaaagtttgtaaattgtattatttggtaaagggttaatatttggaatatatgaaaaattatagttaggtatggtggtttatgtttgtgatttttgtattttgggaggtttgggtaggtagattatttgagtttggtagttttagattagtttgagtaatatggtaaaattttgtttttattaaaaaaagaagaaaaaaattatataaaaaataaattattatttgttaggtttggtggtttatgtttgtaattttagtattttgagaggttaaggtgggtggattatttgaggttaagagtttgagattagtttggttaatatggtgaaattttgtttttttttaaaatataaaaatttgt

SEQ ID NO: 371 - DNA, 4138 bp, Artificial Sequence
  chemically treated genomic DNA (Homo sapiens)
gaattttggatttggatttatgtttttgtttaaattttatgttaaattgtaaattttaatgttggaggtggggttttgtgagaagtgattggataatgtgggtggattttttgttttgatgttgtttttgtgatagagattttatatgatttggttgtttaaaagtgtgtagtatttttttttttttttttttttttttttgtttatgttttgttatgtaagatgttttttgttttttttttattgtttagaatgattgtaagttttttgaggtttttttaggagtagaagttattatgttttttgtataattgtagaatgatgagtgaattaaattttttttttttataaattatttagttttaggtatttttttatagtaatgtgaggatagattaatataattttttatttttagatttttgtatatgtttagttttagatattattgtttttgggagtatgtatagtgtagttttttgttgataaaagtaaagttataaaggtgataaaaatttgtatttggggatatttgattgtgaaagaggatggatagtatatttgtagttatagagattggggtttattgagttgaaatttggtagtattttggtataatatgtgtatgatttgtgtttaatgtttagagattagtgttgagtaaaatagtttggtttggggttgttgttgtttttattttttttttgtttattagagggtggtagagttttttttttttattttggagtttttttaggggttgttgatttttttagttgggtttatagtttagtagggtttatttttatttgggttattttggtttatgttttttttgttttttgagttttttatatggattttgttagtttttttttgtagtttattggttgtttatttgaggtttgttggttgtttatttgaggtttgttggttgttttttgtaggtagtttttgttttttatattttttttttttttgggtttagttgaaagggtgttttttagggtagttttttgtgatttttagtatagtttagttttttataggttttgatgttttttatgttgttattttatagttttgttattattattaattttttagttttatgaagtttattgagtgtttgttttttggttataggaaaattttgtgatagggattatgtttgtaatgttttttgtggaattttaaggtttagtttagtgtttgatatggaatagatgttttataaatattggttaaatgtgtgggagatttttaaaaatagtatattatttttgtgtggtttttagtagttagagtttgttttatgtggatataggggtattggtattagtatgggaggaggttagtaagtgtttgtggttgttttaggaatgaggttttaatttttagagttttagaagggaggatagaggtttgtagggaatagattttttggtttgattttgtagtttaatttagagtttagggttagtttatattatgttgattttggttagtatttttagggtagttttagataaggttggaggtttttttttttgttttttagggggtgatattgtatatagatattatttaggaaatggatttttttggataggaatttggttttgttaaggaagtggaggtggagtttggtttttattttttgttttaatagatttttttgattttttttatatatttgttttgtttttttttgggttttatgaggattttgttttgttaggggtttttgtgtaattttagatttttttttggtattattatggggaaggtggggtgattataggatagttagttttgtagagatagagattatttaggatagttagggagaatatggataggttttgagttgtagttttagttaatagatatggagagggagggtttttttggagttttttttaaggatagtagagtttagagttatttatttttttttattatagttttttttttttaggatatataagatatttttttttttatatgtaggatttggggatttttgagatttttgggtttgggtttttatttttgggttagtggtggggttggtggtattggagatagagggttggtttttttttagttattatttagtgagtttttttttagtttttagagttatttttgttatttttttgttgggtattattttatttttttagagttttggagagtatggggagatttgggattttgttgggtttttttgttataaaggaaaataatttttttggtgtgatagatttaaggatagaatatagtagaggttagtattggggaagataggttgtttttttaggggatgggggtggatttattttgttgaaaagatttgtttgaggaattgaaaatagaagggaaaaaagaggagggataaaagaggtagaaatgagaggggaggggatagaggatatttgaataaagattatattttgatttatgtgatgttgagaagtatttttgttttaggaagagatttagggtagagggaggaaggatagtagattagatagttatagtagttttgataaaatgtttttggaatttaagtttttttttatagaggaggatagagtagatagtagagattatggagttttttttggtttttttttatagatggtgtattttttggtagaggtttttgtttataggtgaagggaggataatttgggagagggtgggaggagggagtatagagattggttggggttttttgggtaggatagggttgtgagatggatagaggtttttgttggagtttgaatagggaagaggatattagagagggataggagttatattagaaaaattaaattgaattggaattggaaaggggtaggaaaattttaagagttttatttttttagttaattgttattggttattatgtttttaaaaattataataattgtattatatgatattttaaataaaaatataataattgtattagatgatattttaaataaaaatataattagggtatgaaatattgtttttatttgtttattgtggatattggaaaataagttttaggttgtggagggttttgggaatttttatgaatttatttataggaatttgtagtttgttttaggtattggggtgtaattaagattatataaatttttgtttttatgaagtttatgtttttatggggaggaagatagatatataaagagatttagaatgtgaggttaggtgttgataagagttttggaggaatagagtagggaaaggttagaaaaggaagatttagggtttttagaggaggtgttagggaagggattttttaagaatgttttgatgtgagtaggatttgaaggtaatggggagggagttgtgaagatttttggaaaagtagattttatatagggaaatgttaaggttggaggtgttaaggaaataggagatatattgttgattttgatttagtaggatatatatatatatatatatatatttatttattttagggttgggggatgaagagatttgtttaggatttaggattttatttttttattttaatgtataggttttaatattgattgatgttttttgtttttttttagttttatttttaattttttggaatttgtttattattgttaagtttattattgaatttatgttgtttaatgttgtagaggggaaggaggtgtttttatttgtttataatttgttttagtatttttttggttatagttggtataaaggtgaaagagtggatggtaattgttaaattataggatatgtaataggaatttaataagttattttagggtttgtatatagtggttgagagataatatattttaatgtatttttgttgatttagaatattatttagaatgatataggattttatattttatatgttataaagttagattttgtgaatgaagaagtaattggttagttttgggtatattgtgagtgatttttttatgatttttgggtgttgggggttagttttattttttatatataggattattaggtttgggttgtgttgtggttttttttgtattatgtattatgttagggtttgggtatttagtgtaggatatatatagaagagataaattttaatagattagaattt

SEQ ID NO: 372 - DNA, 4138 bp, Artificial Sequence
  chemically treated genomic DNA (Homo sapiens)
gaattttgatttgttgaagtttgttttttttgtgtgtattttgtattaaatgtttaaattttaatatggtgtgtaatgtagagggggttatagtatagtttaggtttgataattttgtgtgtgggaagtagaattgatttttaatatttagaggttatgggggaattatttatggtatatttggaattggttagttgtttttttatttataagatttgattttatgatgtgtagggtgtagaattttgtgttattttggatgatgttttggattagtagggatgtattggggtatattattttttgattattgtatgtgggttttggggtagtttgttgagtttttattatatattttataatttgatggttgttatttatttttttatttttgtattagttgtagttaaaaagatgttggggtagattgtggataagtagaagtattttttttttttttgtgatattgaatggtgtggatttaatagtgagtttggtagtggtgggtgggttttagaaggttagaagtgaggttaggagagagtagagagtattggttaatattgggatttatgtattagggtggaaaaatggggttttgggttttgagtaggtttttttattttttagttttggagtgagtgagtgtgtgtgtgtgtgtgtgtgtgttttattaggttaaggttagtagtgtgttttttatttttttagtatttttgattttggtatttttttgtgtggaatttgtttttttaggggtttttatggttttttttttattgtttttaggttttgtttatattagggtatttttgggagattttttttttgatattttttttagagattttgggttttttttttttgatttttttttgttttatttttttagggtttttgttaatatttgattttatattttagatttttttgtatgtttgtttttttttttatgagagtatgagttttatgagggtagggatttgtgtgattttggttgtattttagtgtttgggataggttgtagatttttgtggatgagtttatgagggtttttagggttttttatagtttggggtttattttttaatgtttgtggtaggtggatgaggatagtgttttatgttttggttatgtttttatttaaagtgttatttgatgtagttattatgtttttatttaaagtgttatgtgatgtagttattatgatttttaaaaatgtagtggttagtgataattaattaggaaaatagaatttttgaggtttttttgtttttttttaattttagtttaatttgatttttttggtgtgatttttgtttttttttgatgtttttttttttatttaggttttaataggagtttttgtttgttttatagttttgttttatttaggagattttagttagtttttgtgttttttttttttatttttttttaggttgttttttttttatttgtgagtaggagtttttgttaggggatgtattatttgtggggaggggttgagggagattttatggtttttgttgtttgttttgtttttttttgtggagaagagtttgagttttaggaatgttttgttaaggttgttgtgattgtttggtttgttgttttttttttttttgttttgagtttttttttagggtaggagtattttttagtattatgtgggttagggtgtggtttttatttaggtgttttttgttttttttttttttatttttgttttttttgttttttttttttttttttttttatttttagttttttagataaatttttttggtaaggtggatttatttttattttttgggaggataatttgttttttttagtgttgatttttgttgtgttttgtttttgggtttgttatattagggggattatttttttttgtgatagagaaatttagtagggttttgggtttttttatgttttttagggttttgggaaggtgggatgatgtttaataggaaggtgatagaggtggttttgggggttagaaaaaggtttattgggtggtggttggggagggattagttttttgtttttagtattattaattttgttattgatttagggatggagatttaggtttagaggttttaggagtttttagattttgtatgtagagggggaggtgttttgtgtgttttggaaagagaggattgtggtggagggaggtgggtgattttgggttttgttgtttttggggaaggttttagggggattttttttttttgtgtttgttggttgaagttgtggtttagggtttgtttatgttttttttgattgttttgggtggtttttgtttttgtgaggttgattgttttgtgattattttattttttttatggtggtattaggagggagtttggagttgtatagggatttttggtagaatagggtttttataggatttagaaaggaatagagtaggtatgtgggagagattagaagggtttgttggagtaagggatggaaattaggttttatttttatttttttagtaaagttaggtttttgtttaggggaatttgttttttgagtgatgtttgtgtgtaatgttattttttggagggtaaagaaggagatttttggttttgtttggaattgttttagggatgttgattagggttgatgtggtgtgagttgattttgaattttggattaggttgtagggttaggttggaggatttattttttgtaggtttttgtttttttttttgaagttttgggggttgaggttttatttttggggtagttgtgggtatttgttggtttttttttatgttggtgttagtgtttttgtgtttatatggaatagattttgattgttgggggttatatggaggtgatatgttgtttttagagattttttatatatttaattagtatttatggagtatttgttttgtgttaggtattgggttgggttttgggattttatagagagtattatagatgtggtttttgttatagagtttttttgtaattgggagataggtgtttagtgaattttatgggattgaggagttaatggtaatgatagggttgtgaggtgatagtatagggggtgttggagtttgtgagagattgagttgtattggagattatagggagttgttttgggagatgtttttttagttgagtttggggaaggagggggtgtaggggataggagttgtttgtagagggtagttgataggttttaagtgggtggttgataagttttaggtgggtggttgataggttgtagggaggagttgatagagtttgtgtgaggagtttggagggtgaggaggatgtgggttgaggtgatttgggtgagggtggattttgttaggttgtgggtttggttgaggaggttagtagtttttggggaggttttagggtgggagggaggaattttgttgttttttggtggataggagggaagtggggatagtagtggttttagattaggttgttttatttaatattgatttttagatattgaatatgggttatgtatatgttatgttaaagtgttattaggttttagtttggtgagttttagtttttgtggttataagtgtattgtttatttttttttataattagatgtttttaaatgtagatttttgttatttttgtgattttgtttttgttggtaggaggttgtgttgtgtatgtttttaggggtagtgatgtttggggttaagtgtgtgtggggatttgggagtagaagattgtattagtttgtttttgtattgttataaagaaatatttgagattgggtaatttataaagaaaagaggtttaatttgtttattattttgtagttgtataggaagtatagtggtttttgtttttggggaggttttagaaaatttataattattttggatggtgaaggggaaatgaggaatgttttatatggtagagtatgagtaagagagagagagagagaggggagaggtgttatatatttttaaataattagattatgtgagatttttattatagaaatagtattaaagtagaaaatttatttgtattatttaattattttttataaggttttatttttaatattggggtttataatttgatatgagatttgggtggggatatagatttggatttggaattt

SEQ ID NO: 373 - DNA, 11222 bp, Artificial Sequence
  chemically treated genomic DNA (Homo sapiens)
ggtttggtgttggtttaggagggtagattttgttagggaggtataagttaagttgggggtggggtgggagggtttgttggtaggagggaggtattgtttagattggtttttaaaggttggtttttagaaggaggaggaagagagtagtgaagattgtggggagttttggttttgaggagttagagtttttttttttgttatatttttgattttttttggtggtgttttaagtttagatttattaaagggaattgttagttgtttaagggttagtaaatttttaggttatttagattggattttttgattataaaaattgtgggttaggtgtatagttgtttgaggggtttaaatttgtgtaggtgggtgttggaattttttttgttatagtgttttttttgtgtgtatgtgattagaggtgagagtggttggagattgaagatggtagagtttgtttttttttattagattgaggtttttgatttgttttgtttggggagggtgtttagtggaagttttgggatgtttagtttggataagaaaagttttgggtgagtttgtttttttttttgtgaggtagatttagttgggtttttatatttttaaggagtaggtggagttgttgtaaggaagtgtatgtgatatggaggtattttttggtttgatataaaaaaggatttttaaagttttaggtagtgagtttattatttttaggagtatttaagtagatgttagatgatgatttgtagggaaaattatgtttagtgggaaattggataaaatattgttgaaggttttttttagttataagatattatggttttataattttagatttttttgtttttagttttttataagtttggaatttagaatttaagtttttttggtgttgaaaagttgaagattttgatattttagaattttaattttgggattttaagattttagaattgggagttttgaggatgattttataagttttagttttggatttaaaggattttgtgatatgaaagggaaaaagaggaggtttgatttggtgggatttagttttgttttattgggtattagattaatgtgttttgtatttgtgtgtgtgtgtgtgtgtgtgtagtatgagtgtgtaaggttgtagaaagttttgtatataaaggtagtttggtttttttattatgtgtttgtagtttttttgttttggttataatgaaggttgttatagggataataatagtttttaaatagagttggtgattttaggtagttatagtaattgtgaggtaatgttgttttgttgtagagatgtgtgagtataaatagatgttggtgtttttttattagtttaaatggtaaaatttaaaaggtttattaattttaaagttataggtttttatgagtatgttagttaatgggggtgtttgttaagtgggtgatagttttatattaaatattttagtattagtaatgggttgatgagattttaaatgtttaggttatttttagataatttaggaggttagagatgggagaagagttgggatttgggtagtaattagttttgttttgttttgtatttttaggggtgttttgatatttttgggagggtataggttagagagtatttgaaaattgtatattgtgttttaatttttaggagttttagatttgttttttggttttttttagtgtattaggtagggggttttaggttagatgtggtatagtttaatgttatttttttttttttgttttttttttttatattttggatttatttttagtgagtgattagtagtaagggttaaattgttgagagtttgagattggggtagatttttttagagttgtttttttttttgaggttgggtttggtatagattggggttttagtaatgggtttttaaatgaatgaatgaataaaggaataaatagatgattgattgattgaatgaatgaatgagattttttttggtatttttatggtttttttttttttttttgagatggaggtttgttttgttgttaggttggagtatagtgattttggtttattgtaatttttgttttttgggtttaagtgatttttttgttttagttttttaagtagttgggattataggtttgtgttattatgtttagttaatttttgtatttttagtagagatagggtttgaatatgttagttaggatagttttgattttttgattttgtgatttatttattttagttttttaaattgttgggattataggtgtgagttattatgtttggttttttatggtattttagttatttattttgttattgttttttttattgttaaagagatgggtttttggaggttggttggtttagtatttggggttgatttttggaatggttattagggaaggggtgttagaggtgtagttggtgtttttgatttttttggttgttaggagttagttgatttagtatataggatttattgaatggagatataaggtttttttagggagtggtggtttatggtaattttagaatggttattagttaggttttagagatttatatagagggtgttttgatttaaagttgtattggggaattttaagtttggggattttttgaatttaattttttttttagttatattttttattatttgtttaatttttattaaatatttttgtttatattttgaagttgggatttgattggtagagttagtagatgttgattatttagatggagttttgatattggtttttttagtttggttgtgattggtagtaggtttgtgggagaattgtgtgttttagaatatgattggttatatttgtattttagtaagattggggtagggtagttatttttaaaaagttgtgtaggtggggtagttattattgataaatttagtgtagatttaggatggtttaaatattggtttattttttttgaattttattttttatagttgtaaagtggggtggtgtttgttattttatagaggtgttgtaaagattagatgtaattttgttaagtagttattttgtaaattgtatagttttatgtagatggaaggaagggtttgtgtttattttgattatagtattaaataaattgtattgtatttttattttttttagttatttttttaaaaagattttgagttttttgaatataggaaggtgttttatttgattttgttatttttagtatgtagtagtgtttgatatatagtaggtgttttattattgtgagagggatggatggatgggtggagttatagatggatagaaggatagatggagggatgggtggatgatggatggatagatggatggaggggggatgatgaatggagggataatgagtggatgaatgagggaatgggtggatggatggatggagggatggaggaatagatagatagatggagggatgggtgggtgatggatggatagatggatggagggagggatgatgaatggagggataatgaatggatgaatgaggggatgggtggatggatgaatggagggatgatgggtggatgaatgaattgagggatggatggatgaatatatggatggatggatagatggatagatggaggaattggtggattttggatggatgggtggatggatagatgaatgaatgtttggatagataaagagatgatggatagatgaatagatgaattaagggatgttggatagatggagggattgatagatgttggatggatgggtggtggatggatagatgagtgaatgtatggatagataaagagatgatggatggatgaattaagggatgatagatggatggatggatgagtaattggatggataagtggataaatggatagatggttgaatatttgaatggattgaaggaggatgtatggatgtaagataaggttaattattttttattttttttttttgtaaaattatttatttatttatttaataaatatttatttagtttaaatttggtataaagtattatgtgaggtttaagagatatgtgggttaataaaatagagtttttgtttttttgaaaattgtaaagaaaggggtgtggttttttgagtttaaattttaattttgttagtgattagttgtatattagtgatgtttttttatttttttttaattaaatagggataatgttagtatttattatattgggaggttttgtggggattaaatgagttattaaatgttaagtgtttgggatagggtttggtatttagtaaagttttttgtgagtgttggttgttattattttaatggagaagatggtatgaaaattaggaaataggatgttttttgggaagtaatgtaataggaatttatataaagaaaggaaaggaggaagtaattagtggtgttttaaaggagtatgttaagaaaaattttttagagggaaatttttgagtagggttatgaaaataggagttttttaagagattgtggatttgtttgggattatttggttataagtataaaattatttggtttttttttgttatttttggttgggtgaggggtttttggtaaaggggtagaaggtgtgtgagaggttgtgaatggttaggattgttttggggttagttggggtatttggtggttaagtttagaaatatgataggtttttttgggagggttgattgtagggagtgttgggttttaggttgttggtgttggtttttgtggtgttttttttgttggttatgagagtttagatagtgtttaattttttttttttttttttatatgtataattattttattttttgtggtttgagttgttttgttttgttataatggtatttgttttaaaatagttttttatgtgagggttagagaaaggaaaagattagattttttttggatgagagagagaaagtgaaggagggtaggggagggggatagtgagttattgagtgatttttgttaagtattttagaaggtataaaaatgtttttgggattaggtagttttaaattttagttgttggggttaggatatttagtgagtttatatttgttttttttgttttttttagattgtgttatggggtttagtgatggggaatggtagttggtgttgaatgtttgggggaaggtggaggttgatattttaggttatgggtaggaagtttttattaggtaaaaggaagagattttattgtttttgttatttatattttaagattaagggtgtttagttgtaaggtggaaagtttgtatgtggggtaggttagttggttgtattagttaagggtgttagaatggttatttgttttttttttgtttttaagtgttagggattggatttaggagagggaaaggagttattttaggttgatgttagtagttggaggaagtatgagaattaaatttaggatgtttagagtttattaggaagaattttagaattatagatagttagagttaataagggttttgagagattttgtatagttattttttttataggatgaggataaaaagggattgagaaggggaggatatttttagagttatagtttattaaatgtttttaaagtgttaaggttaagatatgttttttaaggggagatagatttggttttagatttggttttgttattgagttattgggtgatttttgggaaagtatttaattttttggagttttaatttttttttttgtatagtgaggggatattttaatatttatattttagaggagatgtgagaattaaataaaataatgtatgtaagaggtttggtatggtttttggtatatattgagttttagaaatgttagtagttattattgatgaagtttaggttagggattttttaaagtattgtaattagagaatagaagatagaggtttattagtgatttttgatgttgagtatgtttttagtttgagaggtttgaatgatgtggtttgtaagtatattttgttttttattataagggattttagaatatattaaagaaaataaaattttgaggtttgtaaatagagggtggttgtggtttgtatatagaagtttatttttttgttgttttttattttaaaggtgatatattttttttttggtttttttttttattattttgagttggtttttttagaagtttaataggttaagaattaatgtttttgttaatgggaggaaggaagtgggtgttggggttgttataagtgaatggattgtttttggtattttaatttgtagattaatttttttttatttgtgagttagagttaattttttttttttattttgttgttttttgggttttttttgggttttatttatttttagtttttgtttattttgggagtatggttggttttggaagttttgttatttaaaatttgagttgttggtgatttgtgttagaaatatttgaggaagaagagttgagttttttgttgattgtaatggtattgtagtgtgtttatgtttttttttttttgtttttgttatttggttgtaataggttttgttggattgtataaagtgtttttttgattaatatatatatataaattgatattaatttttgggttatagatatgttatgtgattttggataagtttttttatttttgggttttatttttttgttggttgagtgaagggattgttttttatggtttttgagattttgttttatgtttatgttttagaattttttgagtttttgatgtatttttgtttttggtgaggaggtaggatagttaggtgtggaggtaggagattagagtttgtagagtagaggtttttttaaggtgatttgggagttgttagatttaaggtagtgatttgtatgttttgaaagagatttagggtgttgtattattagggaggattatggaggtttgttgggggttgggagttagggataagatataatgtttagggttgttggtttttgaaaggttttagaggtttggtgttttgttatgttttaggttgtgggatatgtagagattgtgttagttggttttgtttttttagtatttggggtatagggaggatggtttttttgggggtagggtggaggaggtttatgtttaggattgtaaatgttatttgtgagagttggtattttgattttgttttagatattgattttggattttttaattgattttgaaaggttatgtttttaattttttgattgtaaaagagggtaaattttatgaagtttagtttgtaaaatattgaggtttttattgtatgtatataaatataaaattttagaatatagaagttggaaggttatttggagattttggttttaggagtggggttttggaagggagggggttgttgagtgggttttatatttttgttttttttttttttatttaaattttttttgttttatttattttggttgttttggggagtggggggaataaaggattttaaggttataaaatgtttgaaaattattagtggtggttattattttttattatagggaggaattgggtttgagagtttttattggttaatggtagttataggtaggattaaaaatttttgggtgatggtgatgataatgataatgataatgataatggtagagatgatgaggaggagaaagatagtaattatttatttagtatatattgattgttgggttttgtttaagtgttttatttattgaagtttgataataattttatgaggtagatatgattatgattattatatttaatagagaggttaagtaatttatgttaagttatatagtaagtaagaaaggagttggaatttaaatttaggtagtttggatttagaatttttgttttttttttttttttttgagatggagttttgttgggattataggtgtatgttattatgtttggttaatttttgtatttttagtagagattaggttttgttatgttggttaggttggttttgaatttttgattttaggtgatttgtttgttttggttttttaaagtgttgggattataagttaatgagtttggtttagaatttttgtttttgattattatgttatattgttttatgattttgttatatgtaagatgggttgttatttatgttttggtttttttattttagtagagttagaggggtgtttatggatttgataatgtgttttatgttttatgtgagtgtttaattgggttttagtttagagaatagtaggaaaatggttttttttttttttgatttggattgaagatttgtttgatgaattaggtttattgatagtagggttgaagttggaaatataggttagtggggttttttgaaatattagagtaaatgttttttgtttatttttataggttgaggggtttttatttgtttattttttggattaggtaaatttaggagaatggttttttgtggttgtttggggggtttttagttgtaaggtttgggtttataggaggtaggtagttgtgtggtgttggaatgattttgtggggagataaattagtttgattttgttttgttgtttaaagtaaatatggggtggggtggggtggtttaggtttataattttagtattttgggaggtaggattggggaattgtttgagtttaggagtttgagattagtttgagttatatagtgagattttttttttttataaaaaataaataaaattagttgggtgtggtggtgtgtgtttgtagttttagttatgtgggaggttgaggtaggaggattatttgggtttaggagattgaggttttagtgagttaagattatattattgtattttagtttgggtaatagagtaatattgtgttttaaaaaaatattaataaagtaaatatgagttttttttttggttgtttggtgttgagtggaaagaaaggtattggtgggtttagatttttttggtttatatatggatgagtaatgatttagagaggttaagtgattttaatattatagagtatattggtgttagaattgggattggaatttagtttttgtaattgttagttttatgtttttttttttagatattagagggtaggggtaggttttaaaatgtttgagatttttagttgttttgtggtttaaatttttggttttgttttgttttagatagtttgtttttagtgttttgatttttgattattgtttgtgtatgttaggttttgtatttgttaggtgggagtttaaggattattgttgttagataataatagttaggagtttagggatttttggatgaaaggtgttagagataagttgttagtgatgtatgaggatttggataaggttttggagtgaggtggtaatgttgggtatggtggtagattatgtttaatatgggggaagggagtgtatgtggtttaggtttgtgtgtgtttttgtgtgtgtgtgtaggtgagtatggtgtgtgttgggatatatttatgtgtatttttgtgtgagtgtgtaggtttatatgtgagtgtgtatatatatttgtgagagtttgtatgtatgtatatgtgtgaggtgttgatatatgtttatgtaggtattagtttgtttgtaaatatttttgtgtaataataataaagtttgaatagttattaagagtatagatatgaagttagattgtttgggttaaatttttagttagttagttttttggtgtttttgtttttttttttgtaaaatggtgtttattttattaggattttaaaattagttaatatggttgggtgtttgtaattttagtattttgggaggttgaggtaggtggattataaggttaggagattgagattattttgtttaatatggagaattttgagaattgtttaaatttaggaggtggaggttgtggtgagtagagattgtattattgtattttagtttgggtaatagagttagattttattttaaaaaagaaaaataaaaaataaaaaaattatgaatttatttttaggttgaggagtttagtattttggttgtgaaatattttttttataaaattttgggatggagattatggggattaggtgtttttttgtgataatttttgggtatggtggtttagggtgtaaattggagtgtggttataatatatattgtgtatttttataaggatgttatagagtttgggtattataaaagaggagttttttaaggaattgaaattattagataggagagagagttttgggtagatagggttgtttgtgttaaatattttagttgtggtataagggaaagggtgggagttatgaaattgttttattttgggtttaggtttgggttttgttgttagttagttaagtgattttggttatttatttttgtggttttttatgagtaaaaggtggaaatttatttttatttagagggtaggtttgattttttttaattagtatttatttgtttatagtaggaaggattgaggtttaaagttggaggtgggtaggaaggattgaggtttaaagttggaggtgggtaggaaggattaaggtttaaagttggaggtgggtaggaaggattgaggtttaaagttggaggtggttgtttagagttttagtagaggtttttggggtattttattgagtgtttggtaggagtgggtgtttgttttagggttgggttgagttgtttttattaggattttttgttatttgtatagtgaggggattgggaggtttagagagttatagtttgggtttaaaataagtaagaggtttttgagtgtgaggattgttttggagtggaatggtttttataggtaggagtgagttttttgtagttagaggtatttaagtagttgaaggataatttttgggtaggaagttgtagagatggttgtagtgtggattagaattgttgttttggttatttagattttattttagtttggtttttttggatagtatttttgtaatagtgagttggtgattttatgttttagaattttggtttttatatttgtaaaatgggaattatatgatatttattatgtgttagatattttgttggtatatagtatatattattttatttaattttttaagtagggataagttatttttattttttatatgaggaagttgaggtatagagaggtgaagtgaatggtttaaggttatatagttgggaagatagggagttaaatttgaattttagtttggttgtttttagattttatattgtattttttatgttgattttagttttttttgtgtttatagg

SEQ ID NO: 374 - DNA, 11222 bp, Artificial Sequence
  chemically treated genomic DNA (Homo sapiens)
tttgtgggtatagggaaggttggagttggtatgggaggtgtggtgtgaggtttgggggtagttagattagagtttaagtttagttttttgtttttttagttgtgtgattttgggttatttattttatttttttgtgttttagtttttttatataagggatggggataatttgtttttatttgaaggattaagtgagatagtgtgtgttatgtattaatagggtgtttggtatatagtgagtgttatataatttttattttatagatgtggaaattgaggttttgaggtgtaaagttattagtttattattgtaggggtgttgtttagagaagttaggttggaatgaggtttgagtgattaaaatagtagttttagtttatgttgtgattatttttgtagttttttgtttagggattgttttttagttgtttaaatatttttagttataggaggtttatttttatttgtgagggttattttattttagagtaatttttatatttagaaattttttgtttgttttgagtttaagttgtgattttttgaattttttagtttttttattgtgtagatgatgaagggttttggtgggagtaatttaatttagttttgagataggtatttatttttgttaggtatttagtgaggtgttttagaggtttttgttgggattttgagtagttatttttagttttagattttggttttttttgtttatttttaattttagattttggttttttttgtttatttttagttttagattttagttttttttgtttatttttagttttagattttagttttttttgttgtgagtaggtgggtgttggttaaagggagttagatttgttttttgggtaggagtgagtttttgttttttatttatggaagattatagagataagtggttaaggttatttggttagttagtggtagagtttagatttaaatttaaaatggaatagttttataatttttatttttttttttgtgttatagttgaaatgtttggtatgggtaattttgtttgtttagggtttttttttttgtttaatggttttagttttttgaaaagttttttttttatgatatttaggttttgtgatatttttgtaaaagtatatagtatgtattgtggttatattttagtttgtgttttgagttattatgtttagaagttgttataaggaagtatttgatttttgtagtttttattttagggttttatgaggagggtattttataattaggatgttgagttttttaatttgaaaatgagtttatggtttttttgttttttgttttttttttttgagatggaatttggttttgttgtttaggttggagtgtagtggtgtaatttttgtttattgtaatttttattttttgggtttgagtaatttttagaattttttatgttaggtaggatggttttgattttttgattttgtgatttgtttgttttagttttttaaagtgttgggattataggtgtttagttatattaattgattttaaaattttgatggggtagatgttattttgtagaggaagaaatagaggtattgaaagattaattagttggggatttaatttaggtagtttggttttatgtttatatttttgatgattatttggattttgttattgttatatagagatatttataggtaaattgatatttatatggatatgtattaatattttatatgtgtatatgtatgtaggtttttatagatgtgtgtgtatatttatatatgggtttgtatatttatatagaggtatatataaatatattttagtatatgttatatttatttgtatatatatatagagatatgtataagtttgaattatatatattttttttttttatgttgggtatggtttgttgttgtgtttaatattgttattttgttttaggattttatttaaatttttgtgtgttattgatggtttgtttttgatattttttatttaagggtttttgagtttttgattattattatttggtgataatgatttttgaatttttgtttgatagatgtaagatttggtatgtataggtgatggttagaggttaggatgttgaaagtagattgtttgaggtagagtagggttaagaatttgggttataaggtagttgggggttttagatattttggggtttgtttttgttttttgatatttagggaagagaatatgggattgatagttatggaagttgagttttggttttagttttggtgttaatgtgttttgtgatgttgaagttatttagtttttttggattattgtttatttatatgtaaattaaaagggtttagatttgttaatgtttttttttttatttaatattagatagttagggagagagtttatatttattttattaatatttttttgagatatggtattgttttgttgtttaggttggagtgtagtggtgtgattttggtttattggagttttaattttttgggtttaagtgatttttttattttagttttttgtgtagttgggattataggtatatattattatgtttagttaattttgtttattttttgtagagaaggggggttttattatgtggtttaggttggttttgaatttttggatttaagtgattttttgattttgttttttaaagtgttgggattataggtttgagttattttattttattttatatttattttaaatagtagagtagaattgggttaatttgtttttttgtaagattattttggtattatatagttgtttgttttttgtgggtttaggttttgtagttaggagttttttaggtagttatagaaggttatttttttggatttgtttgatttggaaaatgaatagatgaaagttttttagtttgtggaaatggatggagggtgtttgttttagtattttagaaagttttgttggtttgtgtttttagttttaattttgttgttagtgggtttggtttattagatagatttttagtttaagttagagagaagggaggttatttttttgttgttttttgaattgaggtttaattggatatttatatggaatatggagtatattgttagatttatgaatatttttttggttttattagaataaaagaattagagtgtgggtggtagtttgttttgtgtgtggtaaggttatggggtagtatagtatagtggttaagagtaaggattttgggttgggtttattggtttgtaattttagtattttgggaggttaaggtgggtagattatttgaggttaggagtttgagattagtttggttaatatggtgaaatttagtttttattaaaaatataaaaattagttaggtatggtggtatgtatttgtaattttagtaagattttattttaaaaaaaaaaaaaaggagtaaggattttggatttaagttgtttgaatttgaattttagttttttttttatttgttgtgtgatttggtgtaagttatttaatttttttgttaaatgtggtgattataattatatttattttataagattgttgttaggttttagtgagtgaaatatttaaatagagtttagtaattagtatgtgttgaataaatggttgttgttttttttttttttattatttttattattattattattattattattattattattattatttaggaatttttggttttgtttgtggttgttattaattggtggagatttttaggtttagtttttttttgtaatgagaagtagtgattattattggtgatttttaaatattttatgattttgaaattttttgttttttttgttttttaaaatagttaaagtaaataaaataaaaaaggtttgagtaaagaaaggaaaaataggggtgtggagtttatttagtagtttttttttttttgaagttttatttttggagttagaatttttaagtgattttttagtttttgtgttttagaattttatgtttgtgtatgtgtagtgaaggttttagtgttttatagattgggttttatggaatttgtttttttttataattagaagattggagatataattttttaaggttagttagaaaatttagagttagtatttagaataaagttaagatgttaatttttatgggtggtatttgtagttttgggtatgagttttttttattttgtttttagggaggttattttttttgtattttaaatattgagagggtagaattagttggtatagtttttgtatgttttataatttaagatgtgatagggtattaggtttttgggattttttagggattagtaattttaggtattatgttttatttttggtttttggtttttggtaaatttttgtgattttttttgatgatgtaatattttgagttttttttaagatgtataagttattgttttaggtttggtagtttttaaattattttggaaagatttttgttttgtaaattttggttttttatttttatgtttgattgttttgtttttttgttaaaggtaaaagtgtattaaggatttagagaattttagggtatgagtgtgggatgggattttggagattatggaagataatttttttgtttaattagtagagaaataaggtttagaggtggagagatttgtttaaggttatatggtatatttgtggtttaggagttgatgttaatttgtgtgtgtgtgttggttgggggagtattttgtgtaatttaatagggtttgttgtagttagatgatagggataggagaagaaagatataaatatattatgatgttattatagttaatagaaaatttaattttttttttttaagtgtttttagtatggattattaatggtttaaattttagataatggagtttttaggattagttatgtttttgaggtagatggaagttggaaatgggtaaagtttaagggagatttaaaggatgatggagtggaagaggaaaattggttttggtttataaataaggagaaattaatttgtaaattaaagtgttaaagataatttatttatttgtggtaattttggtgtttatttttttttttttgttggtagaaatgttgatttttaatttattagatttttgagggaattagtttagaatggtgagggaaggggttaagagaagagtgtattatttttgggatagaaggtaatgaggagatgagtttttatgtataaattatagttattttttatttataaattttagaattttgttttttttggtgtattttggaattttttgtggtagaaggtaggatatatttgtagattatattatttagattttttaaattagagatatatttaatattgaaggttattaatgagtttttattttttgttttttaattgtaatgttttgaaaggtttttagtttgggttttattagtaatagttattaatatttttaggatttagtatatgttaggaattatgttaggttttttgtatgtattattttatttaatttttatattttttttaggatatagatattaggatatttttttattgtataggagaggaaattgaggttttgagaggttgagtatttttttaaaggttatttagtggtttagtggtagagttaagtttagaattagatttgtttttttttgaagagtatgttttaattttgatattttaagagtatttaatgagttgtgattttggaaatgtttttttttttttagtttttttttgtttttattttgtaagagaggtggttgtataaaattttttaggatttttgttaattttgattgtttataattttaaaattttttttggtggattttgagtattttaggtttgatttttatgttttttttagttgttgatattagtttgaaatggttttttttttttttttgagtttaatttttgatatttaaaagtaaagaaaaagtaagtgattgttttaatatttttaattaatgtagttaattgatttattttatgtgtaaattttttattttgtagttgaatatttttgattttagggtgtgggtggtaggggtaatggaattttttttttttatttgatgaggattttttgtttatggtttgggatgttagtttttatttttttttagatgtttagtattaattgttattttttgttgttgagttttatggtgtagtttgaagaagataaaaagagtaagtatgggtttattgggtgttttggttttaatagttggggtttgaggttgtttggttttaagggtgtttttatattttttgggatgtttgataaagattgtttaatggtttgttgttttttttttttgtttttttttatttttttttttttatttagggagggtttaatttttttttttttttagtttttatatgggaagttattttagggtaggtgttattgtggtgaggtaggatagtttaggttatagggggtggggtggttgtgtgtgtggaaagaaggggaggaggttgggtattgtttggatttttatagttgatagaaagggtattatagaagttgatgttagtagtttgaaatttaatgttttttgtggttagtttttttaagaggatttgttatgtttttaagtttggttattaggtgttttggttggttttaggatagttttggttatttgtaattttttatgtattttttgtttttttgttagagattttttatttagttagaagtgatagaaaggaattggatggttttgtgtttatagttaggtggttttaggtaagtttataattttttagagaatttttgtttttatgattttgtttaaaggtttttttttgaaaagttttttttgatatatttttttgagatattattaattgttttttttttttttttttttgtgtaagtttttgttgtattgttttttaaagggtattttattttttggtttttatgttattttttttattaggataatagtagttagtatttataagagattttgttgggtgttaggttttgttttaaatatttggtatttggtaatttatttaatttttgtaagattttttaatgtgataggtattgatattatttttatttaattgagagaaagtagggaaatattattgatgtataattagttgttggtagagttgggatttgaatttaggaagttatgtttttttttttgtagtttttaggagggtaggagttttgttttattaatttatgtattttttgggttttatatggtgttttgtgttaagtttgaattgaataaatgtttattgagtaaatgggtggatggttttgtaaagaaagagagtggaggatgattagttttattttatatttatgtatttttttttaatttatttaggtatttaattatttatttatttatttatttgtttatttagttatttatttatttatttatttgttattttttaatttatttatttattatttttttgtttatttatgtatttatttatttatttatttattatttatttatttaatatttattaatttttttatttatttgatattttttaatttatttatttatttatttattatttttttgtttatttaggtatttatttatttatttatttatttatttatttaaaatttattagtttttttatttatttatttatttatttatttatgtgtttatttatttattttttaatttatttatttatttattatttttttatttatttatttatttatttttttatttatttatttattatttttttatttattatttttttttttatttatttatttatttattatttatttatttttttatttatttatttgtttttttatttttttatttatttatttatttatttttttatttatttatttattatttttttatttattattttttttttatttatttatttatttattatttatttatttttttatttatttttttatttatttgtaattttatttatttatttattttttttatagtgatagagtatttattgtgtgttagatattgttatatgttgaggataataaaattaaataaaatatttttttgtgtttaaggaatttagagtttttttagggagataattaagaggaatgaaaatatagtatagtttgtttagtgttatgattaaggtaggtataggtttttttttttatttgtataagattatatagtttataaagtggttgtttggtaagattatatttaatttttataatatttttgtgaggtagtgagtattattttgttttatagttgtgggagatgagatttagaaaggataagttagtgtttgggttattttgggtttgtattggatttgttagtaatgattgttttatttatatagttttttgaagataattgttttgttttaattttgttgaggtgtaggtgtagttagttatgttttgggatatatagtttttttgtaaatttgttgttagttatagttaagttgagaaagttaatgttagggttttatttgaatagttagtatttattagttttgttagttagattttagttttagaatgtgaatagagatgtttggtaagaattggataaataataggaaatgtagttagaaaaagagttaaatttaaagaatttttaaatttggagttttttagtgtaattttgggttagaatgttttttgtgtgggtttttaaagtttggttggtgattattttaggattgttatgagttgttattttttggaggagttttgtgtttttatttagtgagttttgtgtattgagttggttgatttttagtgattaaaagggttagaggtattggttgtatttttggtgttttttttttagtgattattttagaagttaattttaaatgttaggttagttgatttttaaaggtttatttttttagtagtggaagaagtagtaataaaataagtagttaaaatgttatggggggttgggtgtggtggtttatgtttgtaattttagtaatttgggaggttgaggtgggtggattataaggttaagagattgagattattttggttaatatgtttaagttttgtttttattaaaaatataaaaattagttgggtatggtggtatgaatttgtagttttagttatttgggaggttgaggtaggagaattatttgaatttgggaggtagaggttgtagtgagttgagattgttgtattttagtttggtaatagagtgagtttttattttaaaaagaaaaaaagaagttatggggatgttaaaggggattttatttatttatttagttagttagttatttgtttgtttttttgtttatttatttatttgaaagtttattattgaggttttagtttgtgttaggtttagttttagaaggaaagataattttgagagggtttgttttggttttagatttttagtagtttgatttttattgttggttatttgttggaggtgagtttagggtgtgagagaggagggtagaaagaaggagatggtattgagttgtgttatatttgatttggggttttttgtttggtgtgttggggaaggttaagaggtagatttgagatttttggagattgagatgtaatgtgtggtttttaaatgttttttggtttgtgtttttttgagagtgttagaatatttttgagggtgtggggtagggtagggttgattattatttgaattttagttttttttttgtttttggttttttgagttgtttggggatggtttgagtatttaaaattttattaatttattattgatgttgaaatgtttaatatgaagttattatttgtttggtaagtgtttttattaattggtatgtttatggaaatttgtagttttgaagttgatggattttttaagttttattatttaagttaatgggaaggtattgatatttgtttgtatttatatatttttataatagagtagtgttattttatagttgttatggttatttggagttattagttttgtttgggggttattattatttttgtgatagtttttattatggttagggtagagaagttgtagatatatgataggaaagttaggttgtttttgtgtgtaaaattttttatagttttatatgtttatgttatatatatgtatatatatgtatgaatgtagggtatattagtttgatatttagtggggtaaaattggattttattaagttagatttttttttttttttttttatattataggattttttgaatttaaaattgagatttgtagaattatttttaaggtttttaattttggaattttgagattttagaattaaaattttagagtgttaaagtttttaattttttagtattggagaaatttgggttttagattttagatttatagagagttagaagtagagaaatttagaattatagggttatagtattttgtgattaaaagaggtttttaatggtattttgtttaattttttattaaatatagttttttttatagattattatttggtatttgtttgaatatttttgggagtggtgagtttattatttaaagttttaaaaatttttttttatgttgaattaaaagatgtttttatgttatgtgtatttttttgtggtagttttgtttgttttttggggatatagaggtttagttgagtttgttttataagagaaggagtaggtttatttaagattttttttgtttagattgaatattttaggatttttattgagtattttttttaggtaaggtaagttgggggttttagtttggtggagaaagatgggttttgttatttttggtttttagttatttttatttttggttatatgtatataaagagaatgttatagtaaaggggattttagtatttatttgtataggtttgagttttttaggtagttgtgtatttggtttatagtttttatggttagaaaatttaatttaggtgatttaggaatttgttagtttttggatagttgataattttttttggtaaatttgggtttaagatattattaagggagattaaagatgtggtaagaaggagaattttggttttttaaagttaggattttttatgatttttattatttttttttttttttttttgggaattagtttttggaggttagtttgggtagtgttttttttttgttagtaggtttttttattttatttttagtttagtttgtgtttttttggtagagtttatttttttggattagtgttaggtt

SEQ ID NO: 375 - DNA, 5952 bp, Artificial Sequence
  chemically treated genomic DNA (Homo sapiens)
atatttttgatttttatatgagtatatgtttgagtagtttggattataggtgtgtagtattatatttagttaatttttaaatttttgtgtagtgatgaagttttattttattgtttaggttggttttaaatttttgggtttgagtaatttttttatataggttttttaaagttttgggattataggtatgagttatagtatttgagtaagatgattttttaagataggtgaagatgttagtgtttagaattttatttttaggggtatgtaggtatgaaaggttatatttaagtgagtgttatgttagtttttttagaaatttagttgtttttttttaaatttagtttaataaaaggaggtttggagaattaatgtatataagttagaattatagaatgtatagtatgattattaggatggataatatgtggtttgaataaattttttatttattatatttagtttttttaggttaatggaatttagattaagtatatttttgaagttagtattgtgtgatgaataggggtttggtggaagtgatgttaatagggttttaggttagttttagagtttttttttttttttttttttgttttttgttttttttttgtttgttttttgttttttttttttagatagttttttttttgttgtttaggttggagtgtaatggtgtgattttggtttattgtaatttttgttttttaggtttaagtaatttttttgttttagttttttgagtagttgggattataggtgtttgttattatagttggttaatttttgtatttttagtagagataggggttttaggttaggttggttttgaatttttgattttaggtgatttgtttatttgggttttttaaagtgttgggattataggtattagttattgtatttggtttaagaaatatttttaagtatgtttgattttggtaaatgtttttgattttttttgtaggaaaaaattttagagattgaatttttgtgttaaagaataagtaaaattttaaggtttttgatatatatttttaagtttttattagaaaaattatattaatgtatatttttatttgtaatgtatttaagtgtttatttttttgaattttttttaatatattaggtgttaatatgatttttattaatttggtaggttaaaattttgtttttattgaatttatatttttttgtttattaatgtggttaataaattttatgtttatgaagattaggattggatagtggaggttagatatttttggttttttgtttagatgaataaattttttattttttttaatttatttaagttgagttttttgttattgaaatttaaattatattaattaatataattttttgaggtatattgaagttttaaaatttgtatggttatttattatgttttatgggttttttttttatgtttggaagtttataggaagattttataaatatttattaaaatatttttttattttttattgggttaagatttgaatttgaattttttatttagaatttagtgaataattattaggaaaagtttttttttttttttttgagatggaggtttgttttgttatttaggttggagtatagtggtgtaattttggtttattgtaatttttgttttttgggtttaagtaatttttttgtgttagtttttttagtatttggaattataggtgtgtattattatgtttagttaatttttgtatttttagtagagatggggttttattatgttggtttggttggttttgaatttttgattttagatgatttatttattttagttttttaaagttttgggattataggtatgagttattgtgtttatttagaaaagtttatagtttttatttttttttaatagtttaattaattatttgattaaaatttattttatttttttttttattgatttaatagtatttttattagatgttagagtagttatttaaaatgtaaattggattatattaaagatttgttgttgattatatttttttgtatttttagagagtttataaagttttgtaagagtttattttagtttttttgtaattttattttgtattatttttgttttagatatattagtttgagttttatattaaatttgtttgaatatattttaagtatgttgatttttataattatgttatttttttagtttagaatgtttttttttaattttttaagtagttgttttttttgataagatgttatttttttagagaggttttttttgattatagttataggtatgtttatgtttttattttagtttaatataaaatttatgtaattgtatatttttttattatttgatatttttaggaggatattatttttgtaatagagtagaaataaatagattgatgtatatggtggattttttatggatagagtttgttatttaaaatgtttttaaatttattatatgtaatttggtattaaattaaaatgttattatgtaagtgaatgtttttaaagtttaaaagtttttttaaaataaaatagatttgggtgtggtggtttatgtttgtaattttagtattttgggaggttaaggtaggtagattatatgaggttaggagtttaagattaatttggttaatatggtaaaattttgtttttattaaaaatataaaaattagttaggtgtgatggtgtatgtttgtaattttagttatttaggaggttgaggtatgagaattgtttgaatttaggaggtggagattgtggttagttaagattatattattgtattttagtttgggtgatagagtgagattttgttttagaaaaaaaaaaaagaaaaagaaaaagaaaaaaaaaaagaaattttaagtgataaagtattgtgtaatagtttgaggttgggtatagtggtttatgtttgtaattttatattttgggagattgattgggaagattgtttgagtttaggagttggagattagttagagtgatatagtgggattttttttttataaaaatatttaaaaattagttaggtatagtggtgtatttttgtagttttagttatttgggaggtggtaagaggattttttgagtttagaagttggaggtggtagtgagtagttattttgttattgtattttagtttgggtgttaaagggagatttttttttttagaaaataataaaaaaaaaagtttgatagtttttttgtttgtgttatataaaataatggtatatattataattgaaggtattttataatagaaatgtttttttttgtttttttttaaggttgatttagtgttttaagaggttgatatagaagggtaaagttaagtttttataaaatttagggaagagattgtgaaatttattttagaattttgtatggagttatagttgaattaggaaaaaaaaaaaaaaaaaaaaaaggaaagaaaggtattttagagataaagaatagattaaggagaggagatatttgaagttataatgattgagaatatgttagatttgaaatgaatttttagtttttttaataagataaataaaattaattttatatttagatatatggtagaaaaattaaagaattttgttgattaaggtattaaaagtaattaaagagaagtggtgtgaagaaagtaagagagaaataataaattttgtttattttgtaataattgaaaatttttggttgggtgtggtggtttatgtttgtaattttagtattttgagaggttgaggtaggtggattattttaggttaggtgtttaagattagtttggttaatatggtgaaattttgtttttattaaaaaaaaataataataataatataaaaattagttgggggtggtggtaggtatttgtaattttagatatttgggaggttgaggtaggagatttatttgaatttgggaggtggaggttgtaatgagttgagattgtgttattgtattttagtttggatgatagagtaggattttattttaaaaagaaaggaaaagaaaagaaaaaatattaaatgtgtatgttttttgatttagttgtattattttaaggagttgatattattaaaattgtttaagtgtttaaaggtgtttgtagttaaataataggagattgataaattatgttatatatatgtgatgttatgttttaaagaggtattgatatgataaaagatgtatgtggtataaaattaaatgtattttattaagtatttttttaagtgtttatggaatgagtgtatttttgaaaaaaaaaaagtgtatttgaatttttaaaaaagttttaaaagttttatataatgaatgattgagtgattataagagttggtgggggaatgttaagaggatgatagggagttaagtttaatagaataatttatttttttattttgtgatatttatgagtgtattaattttgtaattgaaaaataaagtgtatatttgtagtagttgtattttttttaggttgtaaggaggtttttttttttggtaggtttgatttgtattttatttttatttttgtggttggaaattttttatttatgtagtgggaggttgaggagttattataaagttggggtttgatgagttgggattgggatttgatttttatatatgtttggatttgttttgtggttgggtttaggagttaaagaggtggggagatttgtgtgatgttgttttgttttgtgtttgttttttttaatgtatgttttagggggtgggttttgtggggagtatggatatgattggttttaaagttttttttgtaaggttgtgggttggatagtgtggtgatgttgtaatgtggtgtagggtgagagtgtgtgtttgtggatgtggtggtattaaatggttgtaggtgtagtagagtggttgttgtttttttaggttttagttggttgttgtgatgtttgtttgtttgttttgaggtttttgaagttgaaattagttagattttttttttttttgtttgtttgtagtggtgttgttgttattttgttattatgtttgaggtgtgtttggtttagggttttatttttaagaaaggtgttggaggtatttaaggattttattaatgaggtttgttgggatattagttttagtggtgtaaatttgtagagtatggatttgttttatgtttttttggtgtagtttattttgtggtttgagggttttgatatttattgttgtgattgtaatttggttatgggtgtgaattttattaggtgagttttgtggttttgggaagttggttttggtttgtttgtatttttggtgtttggtgggagtgtttttgagtttagtttttattggttggtgtgggttatttgtgtttttttattggtttgttatgtagtggggtggggtttagttgagtgtgtggtttggaaaagtttgtgttggttgttgtgtgaatttgtttttttgtgttaaagttataaagtgggtggtggtgggaaaattaagggtttttttgtagtgttaggaatattgttttagggttttttgtttattaaattttgttggttttgaatggatgttttagttgtggtttttttgtttttgagatggttttggtgtgttgtttgggttggtttttaatttttgggtttaagtgatttttttggtttagttgtggttgattttaaatgttttataatgtttttgtgagaaatgtggtagtttgttattttatttagtggtaggagattgtttttatttagaagggatattgttggtggtattttagtataaatattgttagatgtgttttaaaatgtttgtattaataatggtattttttagtagtttgtttattttttattagttttgagatggtttgatgggtgagagtggtaattttttttaattgtgtttgaaatatagttttttagtagatggtgttgattttaaagtatgtgttttttgttttttagt

SEQ ID NO: 376 - DNA, 5952 bp, Artificial Sequence
  chemically treated genomic DNA (Homo sapiens)
attagaagataggagatatatgttttaaaattaatgttgtttgttgaagggttgtattttgaatgtggttagaaggggttattatttttatttattaggttgttttagaattggtggagggtaagtggattgttggaggatgttattattaatgtagatgttttgggatgtatttggtagtatttatattaaaatattattagtagtgttttttttggatagaaataattttttgttattaagtaggatgataggttgttatattttttgtaagggtattataaagtatttaaagttaattgtgattgagttgggaggattgtttgagtttagaagttggagattagtttgggtaatatattgagattgttttagaaataagaaagttatagttaaagtgtttatttaaggttaataggatttagtgagtaaagagttttggaatagtgtttttggtattgtggaaaaatttttgatttttttgttattatttgttttgtgattttggtgtgaaaaagtaggtttgtgtagtagttagtgtgggtttttttgaattgtgtgtttagttgggttttattttattgtgtggtaggttaatgagaaggtgtggatggtttatgttagttaatgagggttaggtttgaaagtgtttttgttaagtattggaggtgtaggtgggttggggttggttttttggggttgtgaggtttatttggtgaggtttatgtttatggttaggttgtggttgtagtggtaggtgttgaagtttttagattgtagggtgagttgtattaaagagatgtgggatgagtttatgttttgtaggtttatattgttggagttaatattttagtaggttttgttgatgaggtttttgagtgtttttaatattttttttgaggatggagttttggattaggtgtgttttgaatatggtggtggagtggtaataatgttgttataggtaggtgggaaggaggaaagtttagttggttttggttttaggagttttagagtgagtgggtgaatgttgtgatgattggttgagatttagaaagataatgattattttgttatgtttgtaattgtttaatgttgttgtgtttgtaagtgtgtgtttttattttgtgttgtgttgtgatgttattatgttgtttagtttatggttttgtggggaagattttagggttaattgtgtttatgttttttgtgaggtttgttttttagagtatatattggaggaagtgggtgtagggtggggtagtgttgtgtaggtttttttgtttttttgatttttgaatttggttgtagaataagtttgggtatatgtggagattgggttttggttttggtttgttaagttttagttttatggtggttttttagttttttattatgtgggtagaaagtttttagttatgaaagtgaaagtgaaatgtaaattaagtttattgggaggaaaagtttttttgtagtttgaagagagtatagttgttgtaaatatgtattttattttttaattatagaattgatgtgtttgtaggtgttataagataaagaggtgaattgttttgttaaatttagttttttattatttttttaatatttttttgttagtttttataattatttaattgtttattgtataaagtttttaaagtttttttaaaagtttgaatatatttttttttttttaaaaatgtatttattttgtaaatatttggaaaagtatttaataaagtatatttaattttatgttatgtatattttttattatattagtatttttttaaaatatagtattatatgtatataatataatttattaattttttgttgtttaattataaatatttttgagtatttaggtaattttggtgatattaattttttgaagtaatatagttgagttaaagagtgtatatatttaatatttttttttttttttttttttttttttgagatggagttttgttttgttatttaggttggagtatagtggtgtgattttagtttattgtaatttttgttttttaggtttaagtgagttttttgttttagttttttgagtatttgggattataggtgtttattattatttttggttaatttttgtattattattattatttttttttagtagagatggggttttattatgttggttaggttggttttgaatatttgatttgaggtgatttatttgttttggttttttaaagtgttgggattataggtgtgagttattatgtttagttagaaatttttaattgttataggatggataggatttgttgttttttttttgttttttttatattatttttttttagttatttttaatattttggttagtagaattttttagtttttttattatgtatttaggtatggagttagttttatttgttttgttgagggaattgaagatttattttaagtttgatatatttttaattattatggttttaaatattttttttttttagtttattttttatttttggaatgttttttttttttttttttttttttttttttttttttagtttagttgtgattttatataaggttttaagatgagttttatagttttttttttggattttgtggagatttaattttatttttttgtattagttttttaaagtattgggttagttttaaaagggaataggaaagggtatttttattataagatgtttttaattgtaatatgtattattattttatgtagtataagtaagaaaattgttaaatttttttttttattattttttagagaggggagtttttttttgatatttaggttggagtgtagtggtaagatgattatttattgttatttttaatttttaggtttgagagatttttttgttattttttaaatagttgggattataggggtgtattattgtatttggttaatttttaaatgtttttgtagagagaaggttttattatgttgttttggttggtttttaatttttgggtttaagtaatttttttaattggttttttaaagtgtgagattataggtatgagttattgtgtttagttttaaattgttatataatgttttattatttagaattttttttttttttttttttttttttttttttttttttttttgagatagagttttattttattatttaggttggagtgtagtggtgtgattttggttaattgtaatttttgttttttgggtttaagtaatttttatgttttagttttttgaatagttaggattataggtatgtgttattatatttggttaatttttgtatttttagtagagatggggttttgttatgttggttaggttggttttgaatttttgattttatgtgatttgtttgttttggttttttaaagtgttgggattataggtatgagttattgtgtttgggtttattttgttttaaaagaatttttagattttaaaaatatttgtttatataataatattttggtttaatgttaaattatatgtaatagatttgaagatattttaaatgataaattttatttatgggggatttattatgtatattaatttgtttatttttgttttattatagaagtgatgtttttttaaaagtgttaaatgataaagaggtgtatagttatgtaaattttatgttaaattgaaatgaggatataaatatgtttatgattgtggttagagaaggtttttttgaggaggtagtattttattagagaagatagttgtttggagagttggaaaaaagtattttaggttgagagaatagtatgattataaaggttagtatatttggaatatatttagataagtttgatgtagaatttagattgatgtgtttgaagtaagagtggtgtaaggtgaggttgtagagaggttggggtgagtttttgtaggattttgtaggttttttaaaagtgtaagggaatgtggttaatagtagatttttgatgtgatttaatttatattttaagtggttattttaatatttagtaaaggtattattggattagtgggagaaagaatgaagtaaattttgattagataattggttaaattattagaaaagaataaaagttgtagatttttttggatgggtgtagtggtttatgtttgtaattttagaattttgggaggttgaggtaggtggattatttgaggttaggagtttgagattagttaggttaatatggtgaaattttgtttttattaaaaatataaaaattagttgggtgtggtggtgtatatttgtaattttagatattagggaggttgatgtaggagaattgtttgaatttgggaggtagaggttgtagtgaattaagattgtgttattgtattttagtttgggtgatagagtaaatttttattttaaaaaaaaaaaaaaagattttttttaataattatttattaaattttagataaagaatttaaatttaaattttgatttaataagaaatggaaaaatattttggtaaatatttatgagatttttttatgggtttttaaatataagaaaaaaatttataaaatataatgaataattatataagttttaagattttagtatgttttaaaggattatattggttagtatagtttaggttttagtgatagagaatttaatttgaatggattaagagaaatagaaaatttatttatttaaataaaaagttagaggtatttggtttttattgtttagttttagtttttataaatgtgaagtttgttagttatattaataagtaaagaaatgtaaatttaatggagatagaattttaatttattaaattaataaaaattatgttaatatttggtgtgttaggaaggatttaaggaagtaggtatttaaatatattgtaagtgggagtatatattggtataatttttttggtggaaatttagaaatgtgtattaaaagttttagaattttatttattttttgatatagaaatttgatttttagggtttttttttatagaagaaattaggggtatttattaagattaagtatgtttaagaatgttttttgagttaggtgtagtggttgatgtttgtaattttagtattttgggaggtttaggtgggtggattatttgaggttaagaatttaaaattagtttgatttaaaatttttgtttttattaaaaatataaaaattagttagttgtggtggtgggtgtttgtagttttagttatttgggaggttgagataggagaattgtttgaatttgggaggtggaggttgtagtgagttgagattatattattgtattttagtttgagtaataagagggaaattgtttaaaaaaaaaaaataaaaaataaataaaaagaaaataaaaaatgaaaagagagagagagaagggttttaaagttggtttaaagttttattagtattatttttattagatttttgtttgttatatagtattgattttaggaatatatttgatttgagttttattaatttgagagggttgagtgtaatggatgagaagtttgtttagattatatgttatttattttagtaattatattgtgtattttataattttgatttatgtgtattgattttttaagtttttttttattaggttggatttgaaaaggagtagttgagtttttagaaggattgatatgatatttatttagatatgattttttatatttatgtgtttttgaaggtgaagttttagatattaatatttttatttgttttagaagattattttgtttgagtgttgtggtttatgtttgtaattttagaattttaggaggtttatgtgggaggattgtttgagtttaggagtttaagattagtttaagtaataaagtgagattttattgttatataaaaatttaaaagttagttgggtgtggtgttgtatatttgtagtttaagttatttgggtatatatttatatagaaattaggaatat

SEQ ID NO: 377 - DNA, 6664 bp, Artificial Sequence
  chemically treated genomic DNA (Homo sapiens)
tattataagggtattaattttattaatgagggaaaagtttttgaggtttaataattattttttgaaggttttattttttaatattattattttggggtttaagttttaatatatgtatttaggaggggtatatatttttaaattatagtaatttgtaagtgatatatattttaggttttatggaatttatatttatttttggttatatttagttatgtggatgttttatagtattttattattaatatgtttaaagtgatgttttatgttttatagttgttttttagtatttttttagaatagtaggatttttagtttgttgtaaagttatatatttaagttatttttgatgatttttttttttttttttaatttagttttagtttttaaaaatattttattgttattttttttttttgaaattgatatttttttaagtttagtatttgttgggattgttgtagagttttttattgtttgttggttttgatgttgtattattagttttttttatgattttttttttttaatttttatttatgattatgttattgttttgtttatatttttttgtttaagtttaatgtttaatttaaaatttttagtatgattttgaatattatttttaaggtatagatattatttaattatttagtttaatgtttatgatttttgttgagtatttagattttgtttatgtttagtgtattgaattaattttagtttataaatttgtattgtttttttttgttaatggattaagttttttatttttatttgtttttttggtaaattttttttattttttaagatttagtttagttaattttgttatgaagttttgtttgatgttttttttattatgttttgtatatagtagtttttattatattgtattgtaaatatttgtattttatttaggtggaagatttatagttatttatttgttatttttgatttttattagttttaaggttgatatatgaattttttttttttatattatgtttagtttttaaaattttaatgagagattaaggtgggttgatatgtatgtatttaaagtataattattaataggtttaaagtgatttttttttttttttgtggggtgagaatgaagatagggggtatggaggttgtatatgataaatttttattatttgtattttatattttggattattttttaaaatttatagaaaaattatattatttttataattagaaaaatatttaattttgttatagtaatgatagtttagtatttttatttgtggtgaaaagatttgaatttatatattttgtattttttgttatttttttttttgaattaatatgaaaaaggataaattttttttttttgtatatattttttggtaatttttaaattttttttttttttttatatatttgtttgtatagagatagggttttattatgttgttaagttggttttaaatttttggttttaagggattttttattttggttttttaaagtgttgggattataggtgtgagttattgtgtttggttaatttttattatttttatttagtagtaatggaggttttggtaagattgatttatttatttatttatttatttgtttatttttgggttagggtagtatatttatgtggtttaatatttaaaagatataaaatttttttttttatttttgtattaggttatttttgtattttatagagggtatatttttattagttttttttattttttttttgaagtgtatttttttttttttttttttttttttagaaggagttttgttttattattaggttggagtgtagtggtgttattttggtttattgtaatatttgtttttagggtttaagtgatttttttgatttagttttttgagtagttgggattataggtatgtgttattatgtttagttaatttttgtatttttagtagagatgggtttttattatgttggttaggatggttttgattttttgataatgtgatttatttgttttggttttttagagtgttgagattataggtgtgagatattgtgtttggtttggaggtgtatttttaagtaaatgtttttatattttttttatttaaaaaaaatatttgttttgatttgggttgttataataaaatgttatagattatgtgttttaaataataaaattttatttttatttagttttggaggtttggtgtgtaagtttagagggtgggtaatattaggttttggtaagggttgatttttttattgataggtgtttttttattttaattttatatgagagtaattaagttttttagtgtttttttttataagagtattaattttattatgagggttttatttttatgtttttatttaaatttaattattttttaaagttttatttttaaatattattttagtggggtgaggtttttaatgtatgaattagtggggtggggggataataaatatttagattatagaaatatgtaaatataagaaataaaattaaaaagatttatgtgtaatattaattgatttttttttttttttttaaaatggagtttattaaaatataaatatgaagttttttagagtatatatttttttttgtttttttttgtagtttttttttttttaatattatttttagggtagtttttttaaaatatggttttaaggttgtgtgtattttttttgtttagattttttggaatagtgtttagtgtttattaggattttgattgtaaatttttttttttgattttaatattataggatgtagtattttttatattttattatggggggtattttgaattatttgggttgattttttggtttttgtgttttatttatataattttttttgtatggaaggtttattttagaattttttttttagtttttgtttaaatgttatttttgttagtattagtagtttttttttttgggtttttatattgttttgtaatataagttataaggtaagtattagaagagaatttttaattattattttgtttttttatttttaatatttttagtggtaattgtattttatttatttttgtgtttatgaagtatagtgttgtattttggagatattatatagaagttggtttaaagggtaataaattgtatttgttaagatgatagtatggatttataataatttttgaaattttataaagaaagatgattgagttaaattgatatatttagtattatagttgtggaagtttgtggttttttttatgttaaaggtaaaatggatataatgaattagttgttatttttagatgatatagaagttgaattttttttaagttttttaaagagaaagatatattaaaatttattaaaattagtattataaattgtatagaatagtttggttttttagagtatttttttggggtagtgagtttttatttaaaaaatgaagtttggattttaaatataagttttaaaagtgattaggttttagtaggagtttttaaatttttatttatattatgatttttaaatgttttgtttttgttgtttaggaataaaaattgttaaggttgagttagatgtaatgtataatattagatgatagatgtagtttattgtgttaaaaggtgttaaatatttaagtgtatgtgatatattttatattataagggtaaggaagttttattttatattttgatttgggttttttaatatatatttgtagtggatgtggtaattagtttttgttttatgttttattaggattaatgtaattagaaatttttaaaatggatttttattatgtttagttttgttttattgttttatttgtttattttaaaaagattttagaatggtgtttaggttgggttggtggtttatgtttgtaattttagtattttgggaggttaaggtaggaggattgttggagtttaggagttggagattagttagggtaatataaggagatattgtttttgtaaataaatagaaaaaaaaaaagtaagaaagaaagagagaaagaaggaaagaataagaaaaaggaaaaaaaaattaattgtagtaagtgtagaaattttttttaaggatatgatggatggtaatgaagatagagtttttgatattggattatttaaagtataatttaagtttttttttttttttttatagaattgtgaatttttgtgttttaattatatttaagttaggtgtggtggtgagtgtttgtagttgtagttgtgttggaggttgaggttgattgtttgagtttaggatttggaggttagtatgtgtaatataatgagatttagtttttaaatgtatgtttttttttatatatttaaaattttgatgtgaaaatattttaaaatttaatatattttaaatgtttttaattgtataataaataaaatgtaaataataaaataatttaatattaaatttaaaaatgaggtagaaataaagtatagtgatataaataataaatttttttttatatttttgaggtggttttttgagttttttattttttttttaaggttattgaaatgtgttttttggagttagtttgtaaattatgtatttagaaaaatataattatatatttttaattttaagtattagaagtgaaagtaatggaattttgatgtaaatataatattatttttttgatgagttattttgagtataataaatttgaattgtgttaatgttgggagaaaaaatttaaaagaagaatggagtgaatagtagttttttgttttgttgattagaaatagtaggatgatatttttttgattggaggagagtgtttgtgtttgtatttagttggtgtttgtttttttgttttttttttagttgttttttttttttttttttgtgttttagttatttgggaaggtttgtttagtgtagttgggttttgattggttgttttgaaagtttatgggttatttgattggtgaatttggggttttttagtgtggtgagtttgaaattgtttgtatttggttttaaagttggtttttggaaattgagtggagagtgatgtggttgttgtagttgttgttgtggttgttgtggaataataagttgggtatagtggttggggttagggttgtgtttaggggatggttgagggttttggagggtgagtattgaggaatggggttttttaagaaggttggattggaggttagggatttgtgtggggtttggttgggttttggggggtggtgggtagggtttttgtttgggtttggttgtgtgagttatattgggttggttttagagggaggttatgggagtttagtttggtggggttaggtggtgtgggggtgggggtttggggttgtagttatgagttgaggttggttgtttttaggaattgtttgaagaggtttttgggttttgattgaagtaaaatttgtttttttatgttgagtgtttgtggagtagtaggtttttttttgggtttggtttttgtgtgttttgttattttgttttgggggtgggaaagtgggattgtatttgggttaggtataggtgtgggtttttagagttaggttgttttgagaaattgattttggaatttgtgggtttttttgggtttgttttgtttatggttttggtttatttggagttgttaagaatagttagtttaggtatttaatttttatgagtagtgtagtgtagttttttttatttaaaaagatatatttttgtttttttttggattgatttttttttgaagatgaatgtgagaaatagaatttaaaggtttattttgagtgtgttttataaatgattttattattagtgatgggtgttagaaaaatttaggtaattatgtttggagttttgatgttttattggtaaattttagaggaagttttgaatttttggttgttagtttttttttttaatttatttattgtgatttaagtatattgtttttttgtttagtttttgatattgtttaggttataattagaattttatttgtggaattgtattttttatttttttgttttatggtgtttaagtgatattttttatttttggaaaaagtattttgaaagttttgagtatgtttgtttgtgattttagtaagtagaggaaaaagattaaaattgttatgtgggtaattgtaaatatttaaaatgtttttgttgttttaaataaaatttttttaatgaatagtttgaatatattttagttttgtttttataattttaaaaaataatgttttgaataaaattaggagtattataaagtggtataaatttgttgaaatatttgggtataattttggtatatgtaggtattattttaaagtgttataaaaagggaatataattttggtttttgtttggaaagaatagataagttgatatttgaatttgagggttattttgattggaagaagttaaatattatattagtatagaatatatatgtttttaatgttttaggagttaagaaggatggaaagttattgtaggagtttttatttttgtaaatattgtttgaatgtaattaatatttatggaatatttatgttgtagtaggtattgtggaaaatgttttatatatagtgttttattaatgtttaaaattatttgagttagtggtatgtaattaagttagttttttttttattttagg

SEQ ID NO: 378 - DNA, 6664 bp, Artificial Sequence
  chemically treated genomic DNA (Homo sapiens)
tttaaagtgaaggaaaaattgatttaattatatgttattaatttgagtagttttaagtattaatgaaatattatatgtaaagtattttttatagtgtttattgtagtataagtattttataaatattaattatatttaaataatatttataagggtaaggatttttataataattttttattttttttgatttttgagatattggaaatgtgtatattttatattagtgtagtatttagttttttttaattaaaataatttttaaatttaggtattaatttgtttattttttttaaataaaaattagaattatgttttttttttgtgatattttaaagtagtatttgtgtgtgttaaagttatatttaaatattttaataaatttatattgttttatgatatttttaattttatttaaaatattattttttaaagttatgaggatagaattaaaatgtgtttagattgtttattaggaaaattttgtttaaaatgataaaaatattttaagtgtttatagttgtttatgtgataattttaattttttttttttgtttgttgaggttatagataaatatgtttaagatttttaaggtattttttttaagagtaggaaatattatttaagtattgtaaaataaaagaatgaaaagtgtaattttatagataaaattttaattataatttaaataatgttaaggattaagtagaaaaatggtatatttgaattataatgaatgggttaaaaaaaaaagttgataattagaagtttaagattttttttgaagtttgttaatgaaatgttagaattttaggtataattatttagatttttttaatatttattattgatgataaaattatttataaagtatatttagaatagatttttaagttttattttttatatttatttttaaagaaaaattaatttagaaagaagtagagatgtatttttttaaatgaaaaaaattgtattatattgtttatgagagttaagtgtttgggttgattgtttttaatagttttaggtgggttggggttgtgggtagagtaagtttaagaaggtttatgagttttaggattggttttttagggtggtttggttttagggatttgtgtttgtatttggtttaggtgtggttttatttttttatttttgaggtgggatggtagggtgtgtaggggttgggtttaggaaagagtttgttattttgtaggtgtttagtgtgggggagtggattttgttttaattaagatttgaaagtttttttaggtagtttttgagaatagttgattttgatttatgattgtagttttgaatttttatttttatgttgtttaattttgttaggttgggtttttatagtttttttttaaagttagtttagtgtggtttatatggttagatttaggtgaaggttttgtttattgttttttgaggtttagttgggttttgtgtagatttttgatttttagtttggtttttttagaggattttgttttttaatatttgttttttgaggtttttggttgttttttagatatgattttgattttagttattgtatttggtttattattttgtggtggttgtagtggtagttataataattgtgttgttttttgtttaatttttaagagttagttttgaagttaagtgtgagtagttttaaatttattgtgttaaagggttttggatttattaattgggtagtttgtagatttttaaagtagttaattagagtttagttatgttgggtaggtttttttgggtggttagagtgtgaaagaaagaggaaagggtggttagagaaaaagtaggagggtgggtgttaattgagtgtgagtgtaagtgtttttttttagttgggagagtgttgttttattgtttttagttagtggagtaggaagttattgtttgttttgttttttttttaaatttttttttttagtattggtatagtttaaatttattatatttaaaatagtttattaaaaaagtgatattgtgtttatattgagattttattatttttatttttaatatttagggttaggagtgtatagttatgtttttttaaatgtgtgatttgtgggttggttttaaggagtatattttagtgattttaagaaggaaatggaaaatttaaaagattgttttaaaaatgtaaaggaaaatttattatttatattgttgtgttttgtttttattttatttttgaatttaatattaaattattttattatttatattttgtttattatataattaaaaatatttgaaatgtattaaattttaaaatatttttatattagaattttaaatatatagagagaggtatgtatttagagattgggttttattatgttgtgtatgttggtttttaaattttgggtttaagtaattggttttagtttttagtgtagttgtgattataggtatttgttattatgtttggtttaaatataattaaaatataaaaatttataattttatgaggggagagaaagaggtttaaattatgttttaaataatttagtgttaaaaattttgtttttattgttatttattatatttttgagagagatttttgtatttattgtagttaatttttttttttttttttttgtttttttttttttttttttttttttttttattttttttttttttgtttgtttgtggagataatgtttttttatgttgttttagttggtttttaatttttaggttttagtaatttttttgttttggttttttaaagtgttgagattataggtgtgagttattagtttaatttaaatattattttaaaatttttttaaaataaataaatagaatagtaaaatagagttagatataataaaaatttattttaaggatttttggttgtattgattttaatgggatatagaataaagattgattattatatttattataagtatgtattagaagatttaaattaggatatggaatggaatttttttatttttgtgatatagagtatattatatgtatttaagtgtttaatattttttaatataatgagttgtatttattatttggtgttatatattgtatttggtttaattttgataatttttgtttttaggtaatagaggtagagtatttgggagttatggtgtaggtaggaatttaagaatttttgttggagtttaattatttttaaaatttatgtttaaaatttaaattttattttttaaatgaaaatttattgttttagagaagtgttttagggaattaggttgttttgtgtagtttatggtattggttttaatgaattttaatatgtttttttttttgagaggtttaagaggaatttaatttttatattatttaaaaatggtaattaatttattatatttattttatttttaatataaagaagattataagtttttatagttgtgatgttaggtgtattaatttaatttaattatttttttttataaagttttagaggttattgtaaatttatgttattattttggtaaatatagtttattattttttgggttaatttttatgtagtatttttaaagtgtaatattgtgttttatagatataaaaatgaataagatatagttattgttggaggtgttgagggtaggggagtaggatgataattgggaatttttttttggtatttattttgtaatttatgttatagggtaatgtgagaatttagaggaggaaattgttaatgttagtagaagtgatatttgaataaaggttggggaaaggattttggagtgggttttttatatagaggaaattgtataagtagagtatagaggttagaaagttaatttaggtaatttagggtgttttttatggtagaatgtagggagtattgtattttgtgatgttaaagttagagaagggagtttatagttagaattttgatgagtgttgaatattgttttaaaggatttgagtaggagaggtatatatagttttggaattatattttaggaaaattattttagaggtggtattaaaaaaaaaaaaattgtagaggagagtaggggaaggtatgtgttttgaaaaattttatatttgtattttggtaaattttattttggaaggaaaagaaaagattagttggtattgtatataagtttttttggttttgttttttatatttatgtatttttatggtttgaatgtttgttgtttttttattttgttaatttatatgttgaaggttttattttattgggatggtgtttggagatgaggttttgggaggtaattaggtttagatgaggatatgagggtggggtttttgtgatggaattagtgtttttataagaagagatgttgaagagtttggttgtttttatgtgaggttagaatgagaaggtatttgttagtgaggaagttagtttttgttagaatttgatgttgtttgttttttgaatttgtatattaagtttttagaattgagtgaaaataaaattttgttgtttaaggtatgtagtttatggtattttgttatggtagtttaggttaagataagtgttttttttagataagaaaaatgtgagaatatttgtttgaaaatatatttttgggttgggtgtggtgttttatgtttataattttagtattttgggaggttaaggtgggtggattatgttgttaggagattgagattattttggttaatgtggtgaaaatttatttttattaaaaatataaaaattagttgggtgtggtggtatatgtttgtaattttagttatttgggaggttgagttaggagaattgtttgaattttggaggtgaatgttgtagtgagttgagatggtgttattgtattttagtttagtgatagagtgagattttttttaaaaaaaaaagaaaagaaaagaaaatatattttgggaaggaggtggaagaaattaataaaaatgtgttttttgtggaatataagagtgatttggtatagaggtggaaaggagagttttgtattttttgaatattgagttatgtgaatgtattattttagtttaaaaatgaatgaataaataaatgaatgaatgaattagttttgttaaggtttttattgttattggataaaaatggtaaaaattggttaggtatagtggtttatatttgtaattttagtattttgggaggttaaggtggaggattttttgaggttaggagtttgaggttagtttggtaatatagtaagattttgtttttatatagataaatatataaaaagaaaaaaaaaatttaaaagttgttggaaaatgtatgtaaaagaagaagatttatttttttttatgttaatttagaaaggaaagtgatagaaaatataagatatatagatttaggtttttttattataagtgaaaatattgaattattgttgttatgatagagttgggtgtttttttgattataaaagtaatgtgatttttttgtaaattttaagaaataatttaaagtgtaaaatatagataataaaagtttgttatatataatttttatgttttttatttttatttttgttttataaaaagagaaagagattattttaaatttgttggtagttgtattttaaatgtatatatgttaatttattttaattttttattggaattttagaaattgggtatggtgtagggagaagagatttatatgttaattttgggattaatgaggattaaggataataggtgagtagttgtggattttttatttaggtggggtgtaaatgtttataatgtaatatggtgaagattgttgtgtgtagaatatagtggagagggtattaggtaaggttttatagtaaagttgattgaattgagttttaaggaataaaaagagtttgttaagaagataaatgaaggtggagagtttgatttattgataagaaagaataatgtaagtttgtagattgaaattaatttagtatgttgaatataaatagaatttgggtgtttagtaagggttataaatattaggttaggtagttaaataatatttatattttgaaggtaatgtttaaggttatgttaaaagttttggattagatgttggatttgaataaaaaaatgtgaataaggtagtgatatggttataagtgggagttaggggggaaaagttatgaagagggttggtgatgtagtattagagttagtagataatggagggttttgtaatagttttagtaggtgttgaatttggggagatgttagttttaagaggaagaaatgataatgagatatttttaggagttgggattgggttaaaaaagggagaaggagttattagggatgatttgggtgtgtggttttgtaataggttgagggttttgttgttttagagagatgttaaggggtagttatggggtatggagtattattttgggtatattgatagtgaagtattgtgggatatttatgtggttggatatggttaagggtaagtgtaggttttatagggtttgaagtgtatattatttgtggattgttataatttgaaggtatgtgttttttttaaatgtatatgttggaatttaaattttaaggtgatggtattaagaggtagggtttttgggaggtgattattaaattttgagggttttttttttattaatgggattaatgtttttataata

SEQ ID NO: 379 - DNA, 6815 bp, Artificial Sequence
  chemically treated genomic DNA (Homo sapiens)
ttgtttgtgaattaaaaatttagagtttttttgtgaattatgttgttaagaattgtagatttaagttttaagattgtatgaatttaaattttgattttatggttttagttggtatgaagatataaagataattttttagtaaaaatagttttgaaagattgggtgtgatggtttatgtttataattttagtattttgggaggttgaggtgggtggattatttgtggttaggagtttaggattagtttggttaatatggtgaaattttgttttaattaaatatataaaaaaattagttgggtgtggtggtggatatttgtaattttagttatttagggaggttgaggtaggagaattgtttgaatttaggaggtagaggttgtagtgagttgagattatattagtgtattttagtttgggtgataaaagtgaaattttgttttaaaaaaaaaaaaaaatggtagaatgttatatggaaagttaatttttagagatagtaatttagatatttataatattatattgtttttttaagtatttatattaataaattaattaatatttgttgatttaatatggttagggatagtgttgggtttttataatttttaagtaattttagttagattttgtttttaaggagtttatgagtagtatgaggagataaaaaatagataaataattttaatttaggaagaatttgataaatgtatgataattattattagaatttagaggagaggaaattttttttgaatagagattaaaggaaggaataatgaatgtggtagtatttgggttggatttattataagaggtatgtttttttttgataagttaagaaagtggggatttaaggtagaagaaaagaaaagttttgagtttttggagtattaaaattttgtttggttgaagtataggttatagttggaggagatggattaggaaggattgttatgggtagagaggaagttttgaatttatgggggaagttatgatttgggttaaagatagagttgggttatgttaagatggattttgaagtagtaaaaaaaaatttaagaaagtaaataggttgtagggtttaggatgaagtttgggaggaaagggtagagtggtttttaggaggttgttaggataggtaaggtaatgggttttaaagggagtggttgaaatgtaatggaaaaagagagattgtaaagttagaaggtttaggaattgttttttgattaggtgtggaaggtaagggaaaattagtttttgaagaagatagtgagattttaatttgggtggttggagagatagtgatgttgggtatagatatggggaagttgagaggaatattatgtttgagaatggtgatttatatttgaataagtttgtaatgtttagtagattgttggaaaagtggggttggagatatatttaatggaggagttagattaatttttatttttttttatttgagagagttagtaagttatggttggaatgtgtgtgtttagtaggagagggtagggagggaagttaagagagttgggagtttgagtgaagtttttgttaaaggtagaagaggaaagttggtgtagtatagtatatttttttatttatgtttattaagtttagggataaggtttattaagatgagtttggaagagaatgttggagagaaagtggttaagaaaattgtttttattgaattttttgggttaattttgattgtaagtttttgaataattaaagtttgtgaggagatagttaatttttttattttttttatgttaatagtgaataattgtagatttttttttttttttttttttttttttttgttttttttttttttttttttgaatatttttgtttttttttgggattggtttagagtatgggtggttattgttgatttataggaggtattattgttattaataaagggtaatagtttttttttttaatatttatttatatttagtatttatttttaatattgattatggagagagtttttttgtgtttaaatattgtaatattgggggttttttaaagtataaaaatatatatttgtatgatggtattattaatatttttatggttttttattttttttttgtattggttttaagagttatttataaattttttagtaattgtatagtgttttagggttagagattggttatttttggtattgtgattagagttatttaatatttaaggtggtgattaatgtttggtaataaagtttttattgggtgttatgtgttttgggattttgagtgtgggtattttaggagtattttagtattgtgtgttagtattatggttgagagaatagttgagaaagtggttaagaggtggatttatgtgaatgttattgggaaatgagagattttgtttttaattatggttagtgtaatttgaaagtttaaaattagtttaaaataaaggtatttatttttattttatgtttatattttaggtttttaataatatgtattttttatatgtttatagaaagtagttaattgagttatttatggaaaggtttgtgggtttggttaatgaagtggaggagtattatattttagttggaaatatatttttagaatgttaaaatatttattttaaagtttggttttttggtgtaattggaggtatggtaatgtttttgtttagagattgggggttagggttagtaaggtatttgatttatatgtattttagaaggtttttattgttaaattatatttttttggaaaaattatttatgttttattttgtaaatttgatatttatatatttttgattggtattttattttagttgtaagattatgatttatagtaagtttgtttttttttttgtttggggtggtagtagaaagtatagggtattttttagtttttaagggtaggggtaaaggggttggggttttttttttttagtatagttttttttggttgtgttatattgttttttgtgagtagatagtaagtttttttttattttttattgttatttatttagtgttgtgtagtagtttagttgtgtgtttgttgggaggggttgttaagtgttttgtttattggttgttttttgaatttttgttattttatgtataaatatatttatatattttttttgtttagtttatatattgagttatttgtatatgtgagtatatttttttttttttttttatttttttggtttttgatttttataagtttatggaatatttttggaaagatgtttttgatttagtagggtaggtttgttttgatttttttttttgtagttttagtattttgagaaagtaatttatttttttggttagtgtttgtattttagtagggagatgaggattgttgttttttatgggggtatgtgtgtgtttttttttttttttaggatttgtaggattttttgtgttatttgtatataatttggtaggtttatattttttaagagttttatgaagtgttttttgtatgtgttttaaaaaggtatttgaaaattgaaagtgtgatttatggaaattaaattatttgtaaaaaattgttttggaaagtaatgattgttggttataaagggaaatatttgtgatgtatttaatgtgtttttaattttttatttgttgataatttatagttattaatgttaaatttgattttggttttagttatatttgtatattgtttaataatggtttatttttgtaagaattagataaaatgtatatttgatataaaatagttaaaaatgtaatttttagtaatagtaagtttggtatttagatagattatgaatattttgttagatattttgttgggtgtttgggatagtaattaaaataaagtattgatagttgtattagagtttattaggttgtagtaaaggaagtttatttaaaagtataaattatttaagattatagatgtatgatatattttatttattttttgtttttttaatatgtatatatatatatatatatatatatatatatatatatgtgtgtgtgtatgtgtgtgtgtatgtttaatttttaatttagttaaaaatttttttttatttgttttttatttggatatttgattttgtatattttagtttaagtgaattgagaagattgagttgtaggattaaaggatagatatgtagaaatgtattttaaaaatttgttagttggattagattgataatgtaatataattgttaaagttttggtttgtgatttgaggttatgtttggtatgaaaaggttatattttatatttagttttttgaagttttggttgtataattaatttgtggaaggtatgaatatttatgtgtgttttaattaaaggtttttttgaattattttttatatgagaatttttaatgggattaagtatagtattgtggtttaatataaatatataagttaggttgagagaattttagaaggttgtggaagggtttatttattttgggagtattttgtagaggaagaaattgaggttttggtaggttgtatttttttgatggtaaaatgtagttttttttatatgtatattttgaatttttgtttttttttttttagatgttttttgttagtttttttagttgttaaatatagttgtttgtggttggttgtgtatgtaattgtatattttattttatttgttttattttggttatagtgtagttttttttagggttattttatgtatatattatgtatttttagttaatgaggagggggaattaaatagaaagagagataaatagagatatattggagtttggtatggggtatataaggtagtatattagagaaagttggtttttggatttgttttttgtgtttattttaagtttagttttttttgggttatttttagtagatttttgtgtgtttttgttttttggttgtgaaatttagtttttatttagtagtgatgataagtaaagtaaagtttagggaagttgttttttgggattgttttaaattgagttgtgtttggagtgatgtttaagttaatgttagggtaaggtaatagtttttggttgttttttagtatttttgtaatgtatatgagtttgggagattagtatttaaagttggaggtttgggagtttaggagttggtggagggtgtttgttttgggattgtatttgtttttgttgggttgtttggttttattggatttgtaggtttttggggtagggttggggttagagtttgtgtgttggtgggatatgtgttgtgttgtttttaattttgggttgtgttttttttttaggtggtttgttggtttttgagttttttgttttgtggggatatggtttgtattttgtttgtggttatggattatgattatgattttttatattaaagtatttgggatggttttattgtattagatttaagggaatgagttggagtttttgaattgtttgtagtttaagatttttttggagtggtttttgggtgaggtgtatttggatagtagtaagtttgttgtgtataattattttgagggtgttgtttatgagtttaatgttgtggttgttgttaatgtgtaggtttatggttagattggttttttttatggttttgggtttgaggttgtggtgtttggttttaatggtttggggggtttttttttatttaatagtgtgtttttgagtttgttgatgttattgtatttgttgttgtagttgttgttttttttgtagttttatggttagtaggtgttttattatttggagaatgagtttagtggttatatggtgtgtgaggttggtttgttggtattttataggtatttgtgtttgtgttgtttgttggggtggttgttgtgtttggtaggagggagggagggagggagggagaagggagagtttagggagttgtgggagttgtgggatgtgtgatttgagggtgtgtgtagggagtttggggtgtgtggtttagtttgggggttttgtgtgtagtttgtgttgtgtttagagttaagtttttttgttgggtagttgaaaaaaatgtattttttatttatttattgtttgtgtgagaggtagatttgaaagtttgggttttttaataaaatatatgttggaaaattagataaagtagtagttatttgtgggggaaaatatttttaggtaaataaatatggggtgttttgagttatttgggaaggttttgtttttggtatttaaagttgggggtgtttggagttagtagagtttagtagagttttatttatttttttaatgtttttgtttaatgtgttttttaaatttttttttatttagattatttgattggaaatatgttagttatgatgatgattttttgggaagtgatttttgttatttgttttttttttttttttattttatgttttggggttttagagagtgattgggagttgaatgggtttgattttggagttagttggttgagtttgtgttggagtggattgttggtatgtgatttttgatagttggaaatttgtaggtgttttgtgagtttaaaataagttatatggaagtataagtgtttaaaaataattttttgttagtttagtgataagtttgttttatttggggagaatgttttggagtggtgtgtgggttagttagggtttgtgttttgtagttattgtggaaggagtgtggttggtttaggatataggagattattttgtgattttaatggtgaaggttgtgtgtttttattttaatttttttttttataagaattgttttttttttttttttttttttttttatttttttttgtttagttttttttttt

SEQ ID NO: 380 - DNA, 6815 bp, Artificial Sequence
  chemically treated genomic DNA (Homo sapiens)
aaaaggagaaattgggtaagagaaaatgggagggagaggagagggagaaagaataatttttgtagggaaaaaaattaaaatgaggatatataatttttgttattgaagttataaagtggttttttgtgttttggattggttgtgttttttttatagtggttgtgaggtgtagattttggttgatttgtatgttattttggggtattttttttgggtgggataggtttgttattgggttggtaggagattatttttaagtatttgtgtttttatatggtttgttttaaatttgtgggatatttataaatttttggttgttagaagttatatgttagtaatttgttttagtgtggatttagttagttaattttgaaattagatttatttaatttttaattgttttttaaagttttaggatgtggggtggggaggaggggaaagtgggtgataggaattgttttttagaaagttattattatagttgatatatttttaattaaatagtttagatgaaaggaaatttggggagtatattaaataaaaatattaaaaggataaataaaattttgttgagttttgttaattttaaatatttttaattttaaatgttaagagtgagatttttttaagtgatttaaagtgttttgtgtttatttgtttggaggtgtttttttttataaataattgttgttttgtttggttttttaatgtgtgttttgttaggaagtttgggtttttgggtttgttttttgtatggatggtaagtgggtggagagtatgttttttttagttgtttggtgagagaatttgattttgaatgtagtgtgggttgtatgtagaatttttgggttgggttgtgtgttttgggttttttgtgtgtatttttgggttgtgtgttttgtggtttttgtagttttttaggttttttttttttttttttttttttttttttttttgttgggtgtggtggttattttgatgggtggtgtgggtgtgggtatttgtagaatgttggtgggttggttttgtgtattgtgtagttgttgggtttgttttttaggtagtagggtatttgttggttgtggggttgtaggaaaggtgatagttgtggtggtgggtgtagtagtattagtgggtttggagatatgttgttgagtggggggaaattttttaggttgttggagttgaatgttgtagttttagatttggggttgtaggggaggttggtttgattgtagatttgtgtgttggtggtggttgtggtgttgaatttgtaggtggtgtttttggggtagttgtatatggtgggtttgttgttgtttaggtatattttgtttaggggttgttttagggggattttgagttgtggatggtttaggggttttagtttgtttttttggatttgatgtagtagggttattttagatgttttggtgtggagggttatggttatggtttgtggttgtgggtagggtgtagattgtgtttttgtagggtagaaggtttagaaattggtgggttatttggaaaaagagtatagtttgaggttagaggtgatgtagtgtatgttttgttgatatgtgagttttggttttggttttgttttgggagtttgtgggtttggtgaagttgggtgatttgatgggagtaagtgtagttttaggatgaatgttttttgttagtttttgggtttttgggtttttaattttaagtattggttttttgagtttatatgtattataaaggtgttggaggatggttagggattgttgttttgttttgatattggtttaaatattattttaggtataatttgatttggagtgattttaaagagtagtttttttgaattttattttatttgttgttgttgttggatagaggttgagttttatggttagggggtgggggtgtatgaggatttgttaaaggtggtttagggaagattgggtttaaaataaatgtgaaagatggatttaggggttggttttttttaatgtgttgttttatgtgttttgtgttagattttgatatatttttgtttgtttttttttttgtttgattttttttttttgttggttagaaatatgtagtgtgtatataggatgattttggggaggattatattgtaattgagatagggtagatagaatggggtgtgtggttgtatatgtagttagttatagatagttatatttagtagttgggggaattgatagggggtatttgaggggaagggggtggagatttagggtatatatataggaagagttgtattttgttattaggagaatgtaatttgttaggattttagtttttttttttgtaaaatgtttttaaagtagatagatttttttataattttttgagatttttttagtttgatttgtgtgtttatgttggattatagtattgtatttggttttattaggaatttttatgtgaaggatgatttagaaaaatttttggttagggtgtatatgggtgtttatgttttttataggttggttatgtaattaaaattttagaaaattgaatataaaatgtgatttttttatattaaatataattttaggttatgaattaaagttttggtaattatgttatattgttggtttggtttagttaatagatttttaaaatgtatttttgtatgtttattttttagttttataatttgatttttttggtttatttgggttaggatatgtagaattaaatatttagatgaaaaataaatagaaaaaagtttttaattgaattaaaagttaaatatgtatatgtatatatatatatatatatatgtgtatatatatatatatatatatatatatatatattaaggagataaaaaataggtgaagtatattatgtgtttataattttggatagtttatatttttgaataaattttttttgttgtagtttaatagattttgatataattattaatattttgttttaattgttattttaaatatttaatagagtatttgatgaagtgtttatggtttatttaaatgttaagtttattgttattaagagttatatttttgattattttatattaagtatatattttatttaatttttataaaaatagattattgttggataatatgtaaatgtagttgaagttaaaattgagtttagtattaatgattatagattgttagtaaataaagggttaaaaatatattaggtgtattgtagatatttttttttatggttagtaattattattttttaaagtaattttttatagatgatttaatttttataaattatatttttaatttttaaatgtttttttaaaatatatgtaaaaagtattttatagggtttttaaaaaatgtgaatttgttaaattatatgtaaatggtataaagaattttataagttttgaaagaaaaaggagatatatatatatttttatggagaatagtaatttttatttttttgttaggatatagatattagttagaaaggtaagttgtttttttaaaatgttaaagttatagagagagaaattaaaataagtttattttgttggattaagaatgtttttttagaaatgttttatgggtttgtagaagttaagggttgagagagtgagaaggaaggaaggaatgtgtttgtatgtgtgagtggtttagtgtgtgaattaggtagagagagtgtgtggatgtgtttgtgtgtggaatggtagggatttgggaagtagttagtaggtagggtatttggtagttttttttggtagatatgtagttgggttattgtatagtgttggatgaatggtagtggggagtgaggggagatttgttgtttgtttatagggagtagtgtggtatagttagagaaagttgtattggggaggagaaattttagtttttttgtttttatttttggaggttggaaagtattttatgttttttgttgttattttaagtaagaggaaaaataggtttgttgtgaattatagttttatggttaaaatagaatgttagttaaaagtgtatggatattaagtttataaaataggatatgggtggtttttttgaaagaatataatttaataataaaagttttttgggatatatgtggattaaatgttttattggttttagtttttagtttttgaatagaggtattgttatgtttttgattgtattaggaaattagattttggaataaatgttttggtattttagggatgtgtttttagttgaaatgtaatatttttttattttgttaattaaatttataaatttttttatgaatagtttagttgattgttttttgtaaatatgtgaaaaatatgtattattaaaagtttaggatatgaatataagataaaggtagatatttttgttttaaattgattttaggtttttgagttgtattgattgtgattgggaatgaggttttttattttttagtggtgtttatatggatttattttttgattatttttttaattatttttttggttatagtattaatatgtaatattgaggtgtttttagagtgtttatgtttagggttttaggatatatgatatttaatggaggttttgttgttagatattagttattattttggatattaaatgattttaattataatgttaggagtggttggtttttggttttgggatattatgtagttattgagagatttatgagtggtttttgagattagtataaaaaagaaatagaaagttataaaaatgttaatgatgttattatgtaaatatatgtttttgtgttttgaaagatttttagtattgtagtgtttgagtataggagagttttttttatagttagtattgaaaataaatattggatataaataaatattgaaaagaaagattgttattttttgttggtgatagtggtgttttttgtaggttaataatggttatttatgttttagattagttttagaaaaaagtaagagtatttagggagggaggagagaggaataggggaaaggagaaggaaaggaaaggggatttgtaattgtttattattgatataggaagaataagaaggttagttgtttttttataggttttgattgtttagagatttataattaaagttagtttaagaagtttagtaaaggtagtttttttaattattttttttttagtatttttttttaaatttattttggtgagttttgtttttgggtttggtgagtatgggtgggaaagtatattgtgttatgttgattttttttttttgtttttggtaaaaattttatttgggtttttagtttttttggtttttttttttatttttttttgttggatatatatgttttagttgtgatttattggtttttttaggtgaagaagggtaaagattgatttggtttttttgttgaatgtgtttttagttttatttttttagtggtttgttgggtattgtaggtttgtttaaatatgagttattatttttaaatatggtgttttttttaatttttttgtgtttgtgtttagtattattgtttttttagttatttagattaaaattttattgttttttttgagggttgatttttttttgttttttatatttaattaagaggtaatttttaagttttttagttttataatttttttttttttattgtattttggttattttttttgagatttattattttatttgttttaatggttttttaaggattattttgttttttttttttggattttattttaaattttgtaatttgtttatttttttggatttttttttattgttttaggatttattttgatatgatttagttttgtttttaatttaaattatagttttttttatgagtttagggttttttttttgtttataatgattttttttagtttattttttttgattgtaatttatgttttagttaagtaaaattttaatattttaagaatttaaggtttttttttttttttattttaaatttttatttttttggtttgttaggggaaagtatgttttttgtaataggtttagtttaaatgttattatatttattatttttttttttagtttttatttaaagaaaatttttttttttttgaattttagtagtagttattatgtatttattaaattttttttgaattagagttatttatttgttttttatttttttatgttgtttataagttttttgaggataaggtttggttagaattatttgggaattatgagaatttagtattgtttttggttatgttaagttaataaatgttggttaatttattgatatagatatttaaaaggataatgtaatattataggtgtttggattattatttttaaaagttaattttttatgtgatattttattatttttttttttttttgagatagagttttatttttgttatttaggttggagtatattggtgtgattttggtttattgtaatttttgttttttgggtttaagtgatttttttgttttagtttttttaagtagttgggattataggtgtttgttattatatttagttaatttttttgtatgtttagttgagataggattttattatgttggttaggttggttttgaatttttgattataggtgatttatttgttttaattttttaaagtgttgggattataggtatgagttattatgtttggttttttaaaattgtttttgttagaagattatttttgtatttttatgttaattgaggttataaagttaaaatttaaatttgtataattttgaggtttaagtttgtaatttttggtagtatgatttataagagagttttgaatttttagtttgtaagtag

SEQ ID NO: 381 - DNA, 5527 bp, Artificial Sequence
  chemically treated genomic DNA (Homo sapiens)
ggttttttgttgttgttaaattaataattttagtttttgggtttagttatttgttgttgttaaaaatgttgttgagagtgatggagaggtgttttagtttttattttatagattagaaaattaaggtttagagaaattaagtagttttggagataggagttatggtttttttatttgagttattattttgaaatattaaggataagttaattttattaatagttttaggtttgtgagaaatgggtttggtttattttgaagattgtaaataaataaaaaaatagattgttttattattgatgagaaatatgagttattttgttaggaattgaaagtatagttgtttataaaaaagttatgttggggtttagtttttttaggtttttgtgtgtgaaaaattatttagttaaagttttttttttatttttttttgtgtttagtaggatgttgaaatttttggaaaagataatggaaattaggggtaggaagagaatagtgtggggtgttaaatagattttagtaatttttttgtttatggttatttttgtgtagatattttgattttttatgtgtaggtggagtagtgttttttagttttttttagaggtttttttttgtttgttttttagttatattgtttgagattgataatgttttatagtaagatggaaatttttttttatagtattattttgtgattttgtagttataaagttgagatttttgaatgtggtatttttttgtttttttattgttttatgtgtatttgtgttattttttttgttttattgtaaatatatttttaaaatttttattttttttatttagaaatagaattataagtggatggttaaataatttaaataaatggtttatggggaaaagtgaattttatattgttttttaaatttttagtgttttttatggagataattattgtttttaatgttttgaatatttttttagagatattttatttttatataagtatatgtgtatttgtgttttttttttattttttttttataaatattagtagattgttttgtattttggttagtttatttaatatattttggagttaggtgtggtggtttatgtttgtaattttagtattttgggaggttgaggtgggtggattatttgaggttgggagtttgagattagtttgattaatgtggagaaattttgtttttattaaaaatataaaattagttaggtgtggtggtatatgtttgtaattttagttattagggaggttgaggtaggagaattgtttgaatttgggaggtggaggttgtggtgagttgagattgtgttattgtattttagtttgggtaatagaatatatagatttgtttgattttttttatgattgttatagttttattgaatgtatggattattagtgttttagttagtattttagtgatgggtatttagggattataaattttataagggtagaaataatattttatttattttttgtttttgatatggtttggatgtgtgtttttgtttaaattatatgttaaggtaattttttatgttagaggtggggtttggtggaggtgattggattatggggatggattttttatgaatgggttagtattatttttttggtgttgtttttgtgatagagtttttatgagatttggttgtttaaatgtgtgtggtatttttttatttttttggttaagtttttgttatgtaagatgtttgtttttgttttgttttttgttatgaataaaagttttttgaggtttttttagaagtagatgttattatgttttttgtatagtttgtggaattgtgagttaattaagttttttttttttatgaattatttagttttaggtatttttttgtaatagtgtgaggatgagttaatatagttttttatattgtaatttaaggtaatgttttgtataaagggatgaattagattgtttagtaattaaaatataaatataaattataagtatatttatttatgaattgggggatagtttttatttgattttgagttttgatatttgttgttttgttttgttaaaaatgtgttagtttttatttagttttttattagttatattattaattaatatgtataatatgtataatttgttaggttaggaggaaatttatggatataagaaatgttttttttttttaggaaatgataatttgttttgggagagaaggtaggtattttttggtaaaagtgatataataaaataattaaaaaaagatggattttttttttttttttgagatggagttatgttttgttatttaggttggagtgtagtggtgtgattttggtttattgtaatatttgttttttaggtttaagtgatttttttgttttaggtttttgagtagttgggattataggtatttattattatgtttggttaatattttgtatttttagtagagatggggttttattgtgttagttaggatggttttgattttttgattttgtgatttgtttgttttggttttttaaagtgttgggattataaatatgagttattgtattaggtgaaaagatggattttttaaaaaaggtgttaggataattaggtttttatttgtaagaaagtaaagttagaagtttattttagattatgtatattagtataaaaatgttaaatggtttaaagataaaatgttaaaataagtttagaaaggtattaaaagaaaatatagaaaatatagtattagtaaaaatttttttatataagatgtaaaagttagaagttataaaggaaaaggttgataaattagaatagataaaaatgtaaaatttttgtataatataagatataaagaatgaatttaaagatatataatgaaggttaggaagatgaagatgttttggtgatgagtggtggttatatattagtattaatgtatttaatgttattgaattgtatatttaaaatgatgaaaatggtaatttttatgttatgtgtattttattatataaaaaaagatatgaaatgaattggggaaaatatttgttatataattaagaatgaaggtttttaataaaatttgtaaaattatatatatttttaggaatgaattaataaataatttttatgaattagaaaaaagtgataatttaattaaaaaatgaataagggatataagtaatgtgttttatagaaaaaataaaaattgataatgaagttatgaaaaaatgtttagtttttttagtaattgtataaaataaattaaaataatgagatattatttttaagattagtaaatgttaaagaaaaataataattggtgagggtgtggggaagtgggtatttatatttatgtttggaaatataaattggtgtaattttatagggagagtaattttataatattttttaaagatttatatgtataattttatggtagagaaatttattttttttttaggatttttttttttttaaaaatagtgatgtggatgaaaaatatatgtttattattgtatagggtataatagttgaaaattggaaatgataatatttatattttttttagtaggggaatggttaaataaattttataagttatttggtagatattaggtatgagttaaaagttagggtttagttagagatggaaagtatattagtaatttgaaagggaaaatgtaatatgaagaattattaattagtaaaagaaggttaattgttaaaggtataagagtatttaagttgtttgtagttagtaggttttggttggtgagtaggaagttgtttgttgggaggttgttaaagttttttgaaggtgagtattattggttttataagttgttggtagttatggtgttaagagtaggaagagaagtattagaatttggaagagaaatttagttttttgttaggttttgtattgtttttttggtgttttttattgataaagttagtaaaattgtgttgttagtaaaggagatttttttatgggatgtagtttggtgttattaaagagaatagagtggatttggagtttagatgtaatataatgattgatattggtatagtatatttattttgtttttgtaaataaaatggtatatgtgatgtttttttttgtttttttgtatataaaataatatttgtttttatttattatgtatttatgtttttattttgtatgttaggagttaagtattttgtatgtattaatttattttgtttttataataatttttatatgtaggaattattatagttattttatgaatgagttgaggaaggtattgagatgttaagtaatttgtttaaggttatgtagttagtaagtggtagagtaagaattattatggttttataagtttaggaaaaagtttgaaagaattaaaatgttaatagtggggattttaaggaagtattgaagaggttatgggagaagtttttattttgttaaaaaattagttttttaaataaataaatatagtgaggtttttttagaagtagatgttattatgttttttgtatagtttgtggaattgtgagttagttaaattttttttttttataaattatttagttttaggtatttttttataatagtgttaggatgagttgatatagttttttatattgtaatttaaggtaatgttttgtataaagggatgagttagattgtttagtaattaaaatgtaaatataaattataagtatatttatttatgaattggggggttgttttgtgtgtatagataaggtatattttttaaaaaaattatttttttaagaagaaaataaattagttaataaatgataatttatagtgttaggaagtgagaaataagtgtgtgataaatggtggagaatgggagtattttttgtagtgggtgggaggagatgaggagggtgttttttggggagtggtagtggttggagtaaaggtttggaggaggtaagttatgtgttttgagtttttggtttttgttttattttgtgtttgagttggtttgaaggttggttgtttagattgagttttttgtttgtttgtattttgttaatagttttagaagaaggtgattggtggttgtttgaggaatattagtgggtaagagaattagtatttttggagtatttgttgtttgtgagattaagtattatgtatattgttttatttattttttatagtaattttattaagtagtttttttttatgtgaaaagatggaggttgggtggagtaaaaggaggtatttagagtttttagtaagtgagaggtagagttgggatttgaatttagatttgtttgatattgaagtttaggttggttttatttttttggattgttttttagggagtagaagatagatattttattttagttggttgtttttagaagtttgattttgttggtttaaaatgattttagttttttgtttagaggttgtgggttgtgggttaagatattagtagaaggagggtttagttagagaggttgatatgggtttttatttattgttatttttttttttttttagg

SEQ ID NO: 382 - DNA, 5527 bp, Artificial Sequence
  chemically treated genomic DNA (Homo sapiens)
tttggaaggaaggagagatgatggtgagtagaagtttatgttagtttttttggttgggttttttttttattgatgttttgatttgtagtttgtagtttttgggtaaggaattaaagttgttttgagttagtagggttagatttttagaagtagttagttaaggtaaaatatttgttttttattttttggaaagtagtttggagaggtggaattagtttagattttagtattaggtagatttggatttaaattttagttttgttttttatttgttgaggattttaaatatttttttttgttttatttagtttttatttttttatgtggaaaagaattgtttggtaaggttgttgtggggagtgaataaagtaatatatatagtgtttaattttatagatagtagatgttttagaaatgttaatttttttgtttattggtattttttaggtagttattagttatttttttttgaagttgttggtggggtataggtaggtaggaagtttagtttgaataattagtttttagattagtttagatataaggtgaaatagaaattaaaaatttagagtatatgatttattttttttaaatttttgttttaattattgttattttttagggaatgttttttttgtttttttttgtttattgtggagagtgtttttattttttattgtttattatatatttgttttttattttttggtattgtgagttgttgtttattaattggtttattttttttttggaaaaataatttttttaaaaaatatattttatttatgtatataaagtagttttttaatttatgaatggatatgtttgtggtttgtatttgtgttttaattattaagtaatttggtttatttttttgtgtaaagtattgttttaggttatagtgtaggaaattgtattagtttattttagtattgttataaagaaatatttaagattggataatttataaagaaaagaggtttaattggtttatagttttataggttgtataggaagtatagtgatatttgtttttggggaagttttattgtatttatttatttgaaggattgattttttaataaagtgaaaattttttttatggtttttttaatgtttttttgaggtttttgttgttaatattttgatttttttagatttttttttaggtttataaagttatagtaatttttgttttgttatttattagttgtgtgattttgggtaagttatttaatgttttagtgttttttttggtttatttataaagtagttataatgatttttgtatgtgaaggttattatgagaataaaatgagttaatatatgtaaaatatttagtttttggtatgtagagtaaagatataaatatataataagtagaaataaatattgttttatatatagagagataaagagagatattatatatattattttgtttataaaagtagggtaagtatattgtgttagtattaattattgtgttgtatttgagttttaagtttattttgttttttttggtgatattaagttatattttataaaaagattttttttgttagtggtataattttattggttttgttagtagagggtgttagagggatggtgtaaggtttagtagaggattggattttttttttgggttttggtgtttttttttttgtttttaatgttatgattgttagtagtttgtagaattagtggtgtttatttttagggaattttggtagttttttagtgggtagttttttgtttattagttggggtttgttgattgtagatagtttgagtgtttttgtatttttagtagttagtttttttttattagttaataattttttatattatatttttttttttaaattattggtgtgttttttatttttaattggattttaatttttagtttatgtttggtatttattagatggtttgtaaaatttatttaattatttttttattgaagggaatgtgagtattattgtttttagtttttagttgttatattttgtgtagtagtgaatatgtgttttttatttatattattgtttttgaaggaaaaaaaattttggaagaggaataaatttttttgttatagggttgtgtatgtaagtttttggaaaatgttgtgagattgttttttttataaggttgtattaatttatatttttaaatataggtgtaagtgtttatttttttatatttttattaattattatttttttttaatatttattaattttaggggtaatgttttattgttttagtttgttttgtgtaattattaaggagattgaatatttttttataattttattgttaatttttattttttttgtgaaatatattgtttatattttttatttattttttagttggattgttatttttttttaatttatagaaattatttgttgatttatttttaaaagtgtgtatagttttatagattttattaagggtttttatttttagttatgtagtaaatattttttttgatttattttatgtttttttttatgtgatgaaatatatataatataaaaattattatttttattattttaagtgtatagtttagtaatattaagtatattaatattgatgtgtaattattatttattgttaaaatatttttatttttttaatttttattgtatgtttttaaatttattttttgtgttttatattatataaaagttttatatttttatttattttaatttattaatttttttttttatgatttttggtttttatattttgtgtagggaaatttttgttggtgttgtattttttatatttttttttaatatttttttagatttgttttaatattttatttttaagttatttgatatttttgtgttggtatgtatggtttgaggtgggtttttaattttatttttttgtaggtggggatttgattattttaatattttttttaaaaaatttatttttttgtttggtgtagtggtttatgtttgtaattttagtattttgggaggttgaagtaggtggattataaggttaggagattgagattattttggttaatatagtgaaattttgtttttattaaaaatataaaatattagttgggtgtggtggtgggtgtttgtagttttagttatttgggagtttgagataggagaattgtttgaatttgggaggtggatgttgtagtgagttgagattgtgttattgtattttagtttgggtgatagagtgtgattttattttaaaaaagaaaaaaagatttatttttttttgattattttattatgttatttttgttaaaaagtatttgtttttttttttaaagtagattattattttttagaagggagggatattttttgtatttataagtttttttttgatttggtagattgtatatgttatatatgttggttggtgatatgattgataggaagttgaatgagaattagtatatttttaataaagtaaagtagtaggtattagaatttagaattaaataaaagttgttttttaatttatgaatggatatgtttgtggtttgtatttgtgttttaattattaagtaatttggtttatttttttgtgtaaagtattgttttaggttatagtgtaggaaattgtattagtttatttttatattgttataaagaaatatttaagattggataatttataaggaaaagaggtttaattggtttatagttttataggttgtataggaagtatagtggtatttgtttttggggaagttttagagagtttttatttatggtagaaggtaaagtaagggtaagtattttatatggtaggaatttgattaagagagtggggaggtgttatatatatttaaataattagattttatgagagttttattataagaatagtattaaagggatggtgttaatttatttatgaaggatttatttttatgatttaattatttttattaggttttatttttgatatgggggattattttgatgtgtgatttgggtagggatatatatttaaattatattagaaatagaggatgggtaagatattgtttttgtttttatgaagtttgtgatttttaaatgtttattattaaggtgttagttggagtattgatgatttatatatttaatggagttgtagtagttatgaaaaggattaagtagatttatatgttttgttgtttaggttggagtgtaatggtatgattttggtttattgtaatttttgttttttaggtttaagtgatttttttgttttagtttttttagtagttgagattataggtatgtgttattatgtttggttaattttgtatttttagtagagatggggtttttttatgttggttaggttggttttgaatttttgattttaggtgatttgtttattttggttttttaaagtgttgggattataggtatgagttattgtatttggttttaagatatgttaaatgagttaattaaggtgtaaaatagtttgttagtgtttgtggggggaaaatgagggaaggatataaatatatatatgtttatataagaataaaatatttttgaaagaatatttaaaatattagaaataataattatttttataaaaggtattgaaagtttgggggatagtgtgaaatttatttttttttatggattatttgtttaaattgtttaattatttgtttgtagttttatttttaaataaagaaaatgggaattttagaagtatgtttatgatgaaataagaaagatgatataggtatatgtgaaatagtaagggaatagaagagtgttatgtttagaagttttaattttgtggttgtagaattgtaaggtggtgttgtaaagggaggtttttgttttgttgtagggtgttgttaattttaggtgatgtggttggaaggtaggtagaaggaagtttttggaaagaattaggaaatgttgttttatttgtgtatggggggttgaggtgtttgtgtagagatggttgtgggtagggaggttgttgagatttgtttagtattttatattgttttttttttgtttttgatttttattgttttttttagaaattttagtattttattgagtataaagagaaataaaaggggaattttgattgagtggttttttatatataaggatttggagaggttggattttggtatagtttttttatgggtagttgtatttttaatttttggtagaatgatttatattttttattagtaatggagtagtttatttttttatttgtttataatttttaagataaattaagtttattttttataggtttaaaattgttgataaagttggtttgtttttgatgttttaagatgataatttaagtggagaggttatggtttttatttttaagattatttagtttttttgggttttgattttttgatttgtaaaatgggaattaaaatatttttttattatttttagtaatatttttagtagtagtaggtggttaaatttaagggttggagttgttaatttggtagtagtaagaagtt

SEQ ID NO: 383 - DNA, 10224 bp, Artificial Sequence
  chemically treated genomic DNA (Homo sapiens)
agtttttatagttttagtattgttttttttattttattttgattgtgtttttgttgtttatttttgtttatttattttaattttagtgttttttttagtttttgggttttaggtgatatattagttagtgggatatgggtttttataggtatttttagtttaatttagttttttttttttttttggttttttggttagtatttgtattatattggtttttattggatatttttgtagttttgggttttttttatagatatattgttggattagttgtttaatttggtttatttgtagagttttttggtttatttgattttaattgaaatttagttttttaagaaggatttggtgttggaataggtaggtattggaaagttagttgtttaggattattgttttattttattagtatttttttgttattttttattttttttttttagattttagaaatttgggagtggttggagtgagaaaatagaggtaagtggtaggtaattgttaagtattagttttagtatgtgtttagttttttagagtaggatttgtggttgtaggtgtgaaggtaaggtttgtggaaatggtagggagggtggaggggatgtaggaggtatggatgtgggtggggtgtttttattttttagggttagttagatttttttgatttttttttaggtgggttgagatttataggttggatgtgttagaggtagtggttttagagtggttttgttgtgtttattgtagtgtagaggtttttaagtgttgtttatgatgttagaatgagtggtattgttgtaggtgagggtattttagaattttggatttttaagttttatttttatattttttatatgtattgttatttttaatatttatttgtttgtagggagtgttaagttaagtattgggaaaagtatggaaagatttgtgttttggtagtttagggtgatagagttaaatgagggttgtagttgttgagggttgattatttatgttaagggaatttatttagaatgtatttttgaattttaagattatggtttagtttttgttggagttttagtttttgtagtggagagtagagtgggtggtaaagttgttgattgattttttttttttttattttaagtgaaggtttgagattttttgttttatttagtgggtaggttaagtgtgttgttttagtaaattggattaggagggttagggttggatgtggggattttttttttttagtatagtaaagttggtttttagaaatatgggtatttttgtgtggtgttttgtggttgttgttgttgtggttgtttggggtggggtgtgaggaggggatgaaggagggaaggaagggtaaggtggggggggttttgtgagagtgtgtttagttttgtttttgggttttatagtttttgtatttaggtttttattgtgtggttttttttagtttttttttgttgtttagtttggattttgggggaggtgttgaagttggggtttgttttgtggttttgtttggtttgtgtttgttagtgtttaaagttagtgaagtatgggtttaattgggttatgttgggggagtttgagtttattgagttgtgggagttggtatttgttgggtgtgttgggaagggttgtatttggttggagtgtgttaatgtgttgtgtattgtgtggggtattgtgtgtaattttatatggtagttggtttttggttgtggttattgtttttagtttgtggggtttgttatgtatatgtggtgtgatttttgtggtgattttatttggggtgttgtgtgtaaaggtttgtagtgtgtgtgtgagtagtggttttgtgtgtttatgagagtggaaggggtagttaaggggtagtgtagttgttgtgggttaagttgtggtagagggggttggtggggatagtttttgaggattaggtttgttatttttgttttattgttgaagagtgtgtgaaaatggtttattttttgttgtattttatttgtatttgggttatagatgagtagaggtggttgtttatatgtaaaaatatgttgattttaagttttttatttttaaaatgttttggttttttttgagaaagggtttgtgtttattgtttttggagtttatttttttaggtttgtttttttttaaatatttatgattttttttagaatttttagggtgaagggaaattattatttatgggagggagtttggaaaaatttagaatttttggtgggttttttgtaagtaggagttttgttgagtttttatttagtaaatatttttttttgatttagtgaattagatgttaaaatatgtatgtagttatatatttagtagtttttttgtatttttgggaattgttagtaagtaaaggttgtttttttttgggtagatattagttggaattattaggggtgtttttatagttttttttgttagtttggattttattgtagatttgttgaattaattgttgggagtggattttaggtattagtaaattttaaaaattttttaaattattgtaatatggagtttgggttgagtattattgttttggtttatttaggaatttgtggatggatagtgttttaggtttgtgtgtgtatggagatttttttatttggtataagaggatattataaatttagttggggggagtataaagttgtgatagaatgtaaagaatgaataaggggttgagtgtggtggtttatgtttgtaattttagtattttggaaggtggaggtgggtggattatttgaggttaggagtttaagattagtttggttaatatggtgaaattttatgtttattaaaaaataaaaaaaaatgagttaggtgtagtggtgggtgtttgtaattttagttatttgggaggttgaggtgggagaattgtttgaatataggaggtggaggttgtagtgagttgagattgtgttattgttttttagttttggtgatagagtgagattttgttttaaaaaaaaaaaaaaaaaaaaaaagaataaggttgggatattgtagtgtttttaaagagaaataaagtagttatggagataagaagtaggatgatttgggtatgtttattagaggtagagataagggagaaattaaagataagtttgggtttttgtttttagtaattgggagtttagtggttatttttgttgtaaagaggaagttgggtaagtgtagtagtgaggttgaagaaaagggaattaaattttggttatgtttatttgaaatgttttttagatattttagtgaaggtattggtatggaggatttagtttgagggtttaggttagtgttttagttgtggatttggggtagatgaatgtagatagattaggttagtgattaggattgagtttagattttattgtgagatatggaagttgagttagaatttgtaaaggagttgagtaggagttgtagggggtaggaggaaaattgggagagtgtagtttttgggagttaaagggagtaagttttaaatgatgttgagggggtgagaatggagaatggaatattggattttatttggtagtatatagattgttgaggattttgttttgggtagttttttggaggaagaggtaagtttggttggagtgggtagaggggagagtgaaggtgaaggattagagtgtatagagattagtgttttggtttgaggggagtagagataggtgataattatagggtagatgtaggttaaaggtgtttagttttttttttaagtaaatgggtagatgtattttatatatgtttttagtgaagggttgggtgtggtggtttaagtttgtagttttagtattttggaaggttgaggtgggtggattatttgagattaggagtttgagattagtttggttaatatggtgaaattttgtttttattaaaaatataaaaattagttgggtatggtggtgggtgtttgtaattttaggtatttaggaggttgaggtagaagaattgtttgaatttaggaggtggaggttgtggtgagttgaaattgtgttattgtattttagtttgggtgataaaagtaagatgtagttttttgttgttgtttttttaattgttaatgaggaaaggggaagttttgtgttaggtgatagagatttaattgttgagtaggtttttttgtttgtggttttttggttggtttttagatgtttaggtggttaatattagagtttgtgtagtagtgtgaggtaatttattgagataggttgggtttgtggagtttggtgagtagtggttttttttttggggtttttttttaatttttgggatatttttttgatttggagtttttttgttttattgttaggtttttttgtagattgtaagtttatttgttattattgttgttgtgtgtttgtttgtttggattgttgtgggttttgggatttgggttgggaatttgtggtggagtgggatatgaatgtggtgagtgtggggttgagggtgtatgggaagggtgaggatgggtaggttatagtgtaggtatttttgagggttgtttgggtgttgtgtgtaaggagtgttttaattgttgattttttggtggtatagagaggttaattttgtgtgggggttgggaggggagtttggattgttggttttgtaagtattttatttgttgtaagtggatttgggtttaggttgatttaggttttgtgtatgtgtattttttgtatttttttgtttttgtttttggttagaggttatttttgtgtgtttgtttggatgttggtatttgtttttgttttttgtggtaggtggggtttgtgagtggagttttggagtgatgaggttatttttgggggtgaagtgtgtgtgtttttgttttggtgtttttgttttaatgagataagagttagattttggtgatttatgttttagttttaatggttgtggtgtggttttggtttgggtgtatgtgtatattgatatgtgtatatgtatgtatgtgattggggtggtggttggtggttatggatgtgtaggattgggggatgggtgggtatggttatgggtgaggtggaggtgtttttttttgaaatgatttggagtagtatgatgagtagtggttattgtagttaagaggatttggatttggagtttgagtagtattttattgtgtgaattttgttagtttgtaggttgtgttgggattaggtgggagttagggggtgttggtgggtgggaggggaagtggttgttggagttttgttttttttggtttgttgttgtgttttgggttggtgggtagttttatttttttggttatgtggttttttgtgggttttggttggggatttgtttgtggaattgtgtgtaagattttgattttattgtttagatgttgggtgttggggtttttttggtttttgttatagataggttgaatatggaaaaagtagttgtatggtttgtggtagatttgagttgggtattatttagttatgattaaagttgattgagtagtttggattagtattttgatttttgtgtttgaatgtttttgttttttttttggggagattaggggaggatgtggagagggaagagtttttgttaggaattgagaagtatgtttaggaaaatttgagaggtagagagagattttgtttttttatttgtatttttgtatggagttagttgagtttttattttttttttgttttggtttgttattagttgttggaatgtggaagattttgttttttttttttagggtggatttggagaaagatttgggaatagataggaaagaagttttgttttggattataagtatttaggagtattttatttataggaagggggaaagttagattataaaatgtttaaagaggtggaaaaagagatttaggttattaatttaggattgtaaggtgttttggaattttttaggtatttttattattggagaattgtgtgttagatgttattggtgtgattattaggtttagagaattaggtttaggtattaggaaaaagaaatagggattgtgaagtttagtatgtttggtagaaatggggtggaaatttttatttaagtaaagaaagtggagttgtgagtgatgttttagataaaattttataaaattttttataaaatgggtggtgtttagtatgttaaaattttagtttagagtttgggtgtaagggttgagttgagtgtagatttttgggtttgtttttatgttagttagttttgagttattttttattgtggaaaggtgggaaaattataagatattaattaattgaaaaggagggttagttatggaggtgtatatttgtaattttagttatttgggagggtgaggtagaaggattatttgaatttgggaggtagaggttgtagtgagttaagattgtgttattgtattttagtttgagtgatagagtgagattttgttttaaaaatagaaaaggaagttaagtatggtggtttatatttttaatgttaatgttttgggaggttaaggtaggtggattatttgtaattaggaatttgaggttagtttggttaatatggtgaaattttatttttattaaatatataaaaattagttgggtatggtggtgtgtgattgtagttttagttatttgggagattgaattattttaattgggaggtaaaggttgtagtgagttaagattgtgttattgtattttaatttgggtgatagggtgaggttttgttttaaaaaaaagaaagaaggttgggtttggtgatttatgtttgtaattttagtattttgggaggttaaggtaggtagattatttgaggttaagagtttgagatttgttaggttaatatagtaaaattttgtttgtattgaaaatataaaaaaattatttggttatggtggtgtgtgtttgtaattttagttattggggaggttgaggtaggagtattatttgaatttagaagatagaggttgtagtgagttgagattgggttattgtattttagtttggatgagagagtaagattttgttttaaaaaaaaaaaaaaaaaaaaagaaagaataggaggttgagaagttttaagttatatgttaaaaaaaaagaaaaaaatattagttttaggttaggtgtagtggtttatatttttaattttagtattttggaaagttgaggtgggtggattatgaggttaggagtttaagattagtttggttaaaatggtgaaattttgttttgattaaaaatataaaaaattagttagttgtggtggtaggtatttgtaattttagttatttgggaggttgaagtagagaattgtttgaatttaggaggtagagattgtaatgagttaagattgtattattgtattttagtttggaaaatagagtgagattttgttttaaaaaaaaaattattagtttttatggatagtggtagagtggagggtgggtttttatggtgtagaagggaaattttatggttttgttgtgtatttgattgggatggttgttgaaatttttttttagtaggtagttttggaaatagaaaaagaaatttttttttttttagaattttggaagggttgtgtagtgtttttaatttaagtttgttttttgagtgaagatagggaggtttattattagaagggaaggggttggaaatgaggttattgtattttagtttagggtttttgggttatttaggaagggaagaaggagtaagtttttttattgttaggtaggagtttagagttattataagaataagttagtattatttttgtgttttttttgttttgtaaataaaatgatttttttttttgttttggtattagagtttgtttggtattttttttgtttttagtattttttttatttgggtatttttttttgttggtgtattgaataaatatatttattgttttatttatagtttttagtttttattttttagggtttatattatttgtttttattaatttgataaggttgtttattgtttttagtaaggtttgtattggggtttttattttagtgtttttttttatttaggagatttttggatatttggggaagaaaatgagtttaaatttttatttttttttttttattttttttttgtaaggttttggttttagtttttagttttatatttttgttggttgtagaatagtagtgggttttgggtaaggagtattttgttaaaatgttttattttgtttttttatttgttttttttatttgtttttattagatggtttaagtgtttaaggggattttagggtggagttagggagaattttggtttttttgggttaggtataagattattttataggaaattttgtgggaatttttttgggataaagtattggttagtgttgagtttagttgtgtttgtgatatttgtattttaattagggtttatttgatgttaataggaagtaaggttgatgtagtggggttaagggagtttgggagaagaaagttggtttagagttttggttgttttgttttatattttatttttttggtaagaatttagtttttagatgaggtggggagtgagtggttgagttaaaaatttttgggttgggtatgatggtttatgtttgtaattttagtattttgggaggtgaaggtaggtggattatttgaggttaggagtttaagattaatttggttaatgtggtgaaattttatttttattaaaaatataaaaattagttgggtgttgttgtggtatgtgtttgtagttttagttatttgggagtttgaggtaggagaattgtttgaatttaggaggtagaatttgtagtgagttaagatttagttattgtattatagtttgggtgatagagtgaggttttgttttaaaaaaaaaaaaaatttttgggttaaatttttagatagtataggtaggtgtagaaatttattaggaagttgtttgtgtatttttggtagattggagtttggtttaaagttgttttttatgtagtttgggttaaggttaaatattatgttatagtgattttttttattatgtgtgagatatggagaattggttttaagtattattttgtttattggtggttggattattgatgtgtattattttttattttttttattttgtagtgggttatggttttgtgttggggtagaggagaaaaatgggttgttttttttaggataaatttttattttaatttaattagggtgttgtgattagaatgtgtaattgaggtgtgattttattgattttttttttttttgagattgagttttgtttttgttgtttaggttggagtgtgatggtatgattttagtttattgtaatttttattttttgagtttgagtaatttttttgttttagttttttaagtagttgggattataggtatgtgttattatgtttggttaattttgtatttttagtagagatggggtttttttatgttggttaggttggttttaaatttttgattttaggtgatttatttgttttggttttttaaagtgttagaattataggtgtgagttaatgtgtttagtttgtttttgttttttgtgttttgaagtagggttttatttagttttttaggttggagtgtagtgatatgataatagtttattgtagttgtaattttttgggtttaaatgatttttttattttagttttttgaatagttgggattataggtatattattatatttggttaatttttttttttttttttttagtagagatgaggttttgttatgttgtttaagttggttttaaatttttgaggattaagtgatttttttattttagttttttaaaatgttgggattgtagatgtgagttattatatttagtttgattttattttaaatgagagtttttttttagagttttttagttgtttttggtttttggttatgtgtttttagttgtttttgtttttgtggtatttttaaggttatatttagtgttgaggttttaggtaggtagtagagagaagttaaatgattttgttttttttttatttatttagagtatgtaaaattaggagtagtggtgggtttagggtgggtattagttatgtatatgtatattagggatagggggttaaaggtagttagtttttaaagattgttttagaggttattttttagagaagttttgggttttttaagggttttgtgtttatgttggtttattttgtagg

SEQ ID NO: 384 - DNA, 10224 bp, Artificial Sequence
  chemically treated genomic DNA (Homo sapiens)
tttgtaagatgggttagtatggatatagggtttttgaggaatttagggtttttttgaaaaatggtttttggggtagtttttggaaattgattgtttttggttttttgtttttgatgtatatatatatagttggtgtttattttgaatttattattgtttttggttttgtatgttttgggtggataagggaaagatagaattatttggtttttttttgttgtttgtttagggttttagtattgaatgtagttttaaggatattatagaagtaggggtaattgaaggtatatggttaggggttaggaatagttgagggattttgaagagggatttttatttaaagtaaaattaggttgggtgtggtggtttatatttgtaattttagtattttgggaggttaaggtaggaggattatttgatttttaggagtttgagattagtttgggtaatatagtaagattttatttttattaaaaaaagaaaaaaaaaaattagttaggtgtggtggtgtgtttgtagttttaattgtttaggaggttgaggtgggaggattgtttgagtttgggagattgtagttatagtaagttattattgtgttattgtattttagtttggggaattgagtgagattttgttttaaaatataaaaaataaaaataggttgggtatgttggtttatgtttgtaattttagtattttgggaggttgaggtgggtggattatttgaggttaggagtttgagattagtttgattaatatggagaaattttgtttttattaaaaatataaaattagttaggtgtggtggtatatgtttgtaattttagttatttaggaggttgaggtaggagaattgtttaaatttgggaggtggaggttgtagtgaattgagattgtgttattgtattttagtttgggtaataagagtgaaatttggttttaaaaaaaaaaaaaattagtaaaattatattttaattgtatattttgattatagtattttagttgagttggagtgagggtttgttttggagaaggtagtttattttttttttttgttttggtatggggttatgatttattgtagggtgagaggagtggagagtggtgtatattagtagtttagttattagtggatagagtagtatttggagttagttttttatgttttatatatagtgagaaaaattattgtgatatgatgtttaattttgatttaagttgtataaaaggtagttttaggttaggttttaatttgttagaggtatataggtagttttttggtgggtttttgtatttgtttgtgttgtttggagatttggtttaaagattttttttttttttgagatgaagttttattttgttgtttaggttgtagtgtagtggttggattttggtttattgtaagttttgttttttgggtttaagtgatttttttgttttagatttttgagtagttgggattataggtgtgtgttataataatatttggttaatttttgtatttttagtagagatgggattttattatattggttaggttggttttgaatttttgattttaagtgatttgtttgtttttattttttaaagtgttgggattataggtgtgaattattgtatttgatttagagatttttaatttgattatttattttttattttatttagggattggatttttgttggaagggtggagtgtgggatagggtagttagggttttgaattgattttttttttttagatttttttggttttattgtattagttttattttttgttgatgttagataggttttagttagaatgtgagtgttatagatatagttaagtttagtgttgattaatattttgttttagaagaatttttataaggttttttgtagaatgattttgtgtttagtttaggagagttagggttttttttgattttgttttggagtttttttaagtatttaaattatttgatggggataaatggagaggatagatgagggagtagggtggagtgttttagtagaatgttttttatttagaatttgttgttattttgtagttagtaaggatgtggggttaagaattaaggttagggttttataggaaaaaggtaaagggggaggggtgggaatttaagtttatttttttttttaagtatttaaaggttttttggatggagaagagtattggagtaaaaattttagtataaattttattggggatagtgggtaattttgttgggttagtaaaaataaatggtgtgggttttggaaaatgagggttggaggttgtgaataaagtagtggatgtgtttgtttagtatattaatgggaagaagtatttagatgggaggagtattaggggtaggagaaatgttagatagattttagtgttagggtaagaaggaagattattttgtttgtagaatagggagggtatagggatggtgttaatttgtttttgtgatggttttgagtttttatttaataatgagaaagtttgtttttttttttttttttggatgatttaggagttttgggttgggatgtagtgattttatttttagtttttttttttttggtgatgaatttttttatttttatttagaaaatagatttggattagaggtattgtatagtttttttaggattttaaaggaggaagagtttttttttttgtttttaaagttgtttgttggaagaggattttaatagttattttagttggatgtatagtaggattatggaattttttttttgtattatagggatttattttttattttattattgtttataaaaattgatggttttttttttgagatagagttttgttttgttttttaggttggagtgtagtggtgtgattttggtttattgtaatttttgttttttgggtttaagtaattttttgttttagttttttaagtagttgggattataggtgtttgttattataattggttaattttttgtatttttagttgagatggggttttattattttggttaggttggttttgaatttttgattttatgatttatttattttggttttttaaagtgttgggattaaaggtgtgagttattgtatttggtttaaaattgatgtttttttttttttttttaatatataatttgggattttttagttttttattttttttttttttttttttttttttttgagatagagttttgtttttttatttaggttggaatgtagtggtttagttttgatttattgtaatttttgttttttgggtttaagtgatatttttgttttagtttttttagtagttgggattataggtatatattattatggttagataatttttttgtatttttagtatagatggggttttgttatgttggtttggtaggttttgaatttttggttttaagtgatttgtttgttttggttttttaaaatgttgagattataggtatgagttattaagtttagtttttttttttttttttgagatagagttttattttgttatttaggttggagtgtagtggtatgattttggtttattgtaatttttgttttttggttgaagtgatttagttttttaagtagttgggattatagttatatattattatgtttggttaatttttgtatgtttagtagagatagggttttattatgttggttaggttgattttgaatttttgattgtaaatgatttatttgttttggttttttaaagtattggtattagaggtgtgagttattgtatttggtttttttttttatttttgagatagagttttattttgttatttaggttggagtgtagtggtatgattttggtttattgtaatttttgttttttaggtttaagtgatttttttgttttatttttttaagtagttgggattataggtgtgtatttttgtggttagtttttttttttaattggttagtgttttgtggtttttttatttttttatagtggaaaatggtttaggattgattgatatgaagataagtttaggggtttatatttaatttaatttttgtatttaagttttgggttaagattttggtgtgttgagtattatttattttgtaaggaattttgtaaaattttatttgaagtattatttataattttattttttttatttaaataaggatttttgttttatttttgttaggtatattgagttttatagtttttgttttttttttttggtgtttaggtttggttttttgagtttggtggttatattaatggtatttggtatatagttttttgataatggggatatttaggaggttttgagatattttatagttttgggttagtaatttggatttttttttttatttttttaggtattttataatttagttttttttttttttgtgggtaaagtgtttttgaatgtttatggtttaaaataagattttttttttatttatttttaaatttttttttagatttattttagaggaagggaatagaattttttatattttagtagttggtgataggttagaatagggaagaggtgagggtttagttggttttatataggagtgtagatggaggagtaggatttttttttgttttttaagtttttttaaatatattttttaatttttggtgaggatttttttttttttatatttttttttagtttttttaaggagggagtaggagtatttgaatgtggaaattgaggtgttagtttaaattgtttggttggttttagttatagttggataatgtttggtttaggtttattataagttatatagttgttttttttgtgtttaatttgtttgtgatagaaattaagggggttttggtatttagtatttaggtggtggaattggggttttatgtatggttttgtgggtaggtttttggttaggatttgtggggagttatgtagttaggagggtggggttgtttattgatttaggatgtggtaatggattggggagggtggagttttagtgattgtttttttttttgtttgttggtattttttggtttttatttggttttggtgtggtttgtgagttagtgaggtttgtgtggtgaagtattgtttgagttttgagtttgagtttttttggttgtagtagttattgtttgttgtgttgttttaggttattttgaaagaaggtgtttttgttttgtttatagttgtatttgtttgttttttagttttgtgtgtttgtagttgttaattattgttttggttgtgtgtgtgtgtgtatgtgtgttagtgtgtgtgtgtgtttgggttagagttgtgttgtaattgttaagattgaaatgtagattgttgggatttagtttttgttttattggggtaggaatgttggggtggggatatgtatgttttgtttttaggaatgattttattgttttggagttttatttatagattttatttattatagggaatgggggtgggtgttagtgtttgggtaagtgtataagagtggtttttggttggaggtgagggtgggaaggtgtgggaagtgtgtgtgtgtggagtttgggttagtttgggtttgggtttgtttgtagtgggtggagtatttgtggagttggtaatttaggttttttttttagtttttgtgtagaattagtttttttgtgttgttgggaaattggtaattagaatgttttttgtgtgtggtatttaggtagtttttgagaatgtttgtattgtggtttgtttatttttgttttttttatatgtttttggttttgtgtttattatgtttgtgttttgttttattgtgggtttttagtttaggttttggggtttgtaatagtttaggtagatgagtgtgtggtagtggtagtggtaggtgaatttgtaatttgtagagaggtttggtggtgaggtggaggagttttaggttggggaaatgttttggagattgaagggaagttttagggagagggttgttgtttgttaggttttgtaggtttgatttattttagtgggttattttatattgttatgtggattttaatgttggttatttgggtgtttggaaattggttggaaggttataggtagagaggtttgtttaatagttggatttttattgtttagtatagaattttttttttttttattggtaattaaaaaaataataataaaaaattgtgttttgtttttgttatttaggttggagtgtaatggtgtgattttggtttattgtaatttttgttttttgggtttaagtgatttttttgttttagttttttgagtatttaggattataggtgtttgttattatgtttagttaatttttgtatttttagtagagatggggttttattatgttagttaggttggttttaaatttttgattttaggtgatttatttgttttggttttttaaagtgttgggattataggtttgagttattgtatttggttttttattgggaatgtatatggaatatatttgtttatttatttgaaggaaaaattaaatatttttaatttatgtttgttttgtggttgttatttgtttttattttttttagattaagatattggtttttatatattttaattttttgtttttatttttttttttatttattttagttaggtttgtttttttttttaggaaattgtttgggatagggtttttagtgatttgtgtattattaaatggaatttagtgttttattttttatttttatttttttagtattatttgaagtttgttttttttgatttttaggggttatatttttttagttttttttttattttttgtagtttttgtttagtttttttgtagattttgatttaatttttatattttatgatgaagtttgggtttagttttgattattggtttggtttgtttatatttatttgttttagatttatggttgaaatattgatttaaatttttagattagattttttgtgttagtatttttattaggatgtttaaaagatgttttaagtgaatatggttaaaatttaatttttttttttttagttttattgttatatttgtttagttttttttttgtagtaaaaatggttattaggtttttagttattggagataaaagtttaaatttatttttgattttttttttgtttttatttttgataaatatgtttaaattattttgttttttatttttatggttattttatttttttttgagaatgttgtaatgttttagttttgttttttttttttttttttttttttttgagatagagttttattttgttgttaaggttggagggtagtggtatgattttggtttattgtaatttttgttttttgtgtttaagtaatttttttattttagttttttgagtagttgggattataggtatttgttattatgtttggtttatttttttttattttttagtagatatgaggttttattatgttggttaggttggttttgaatttttgattttaggtgatttatttgtttttgttttttgaagtgttgggattataggtatgagttattgtgtttggttttttgtttattttttgtattttgttataattttgtgttttttttagttgaatttgtgatgtttttttgtattggatgagagggtttttatgtatatatagatttgggatattatttatttataagtttttaaataggttagagtagtgatgtttaatttagattttatgttataataatttggggagtttttaaaatttattgatgtttagggtttatttttagtagttgatttaataggtttgtggtgggatttaggttagtggggaggattgtaaaagtatttttggtgattttagttggtgtttatttaggggagagtaatttttgtttgttggtgatttttaggggtgtagaaggattgttgggtgtgtggttgtgtgtatattttagtatttgatttattgggttagaaaagggtgtttgttaaataaagatttaataaaatttttgtttgtagggggtttattaaaggttttaaatttttttaggtttttttttataggtggtaatttttttttattttaaaggttttggagggggttatgagtgtttgagaagaggtaagtttgggaagatggattttgaggatagtaggtataaatttttttttaagaagggttaaggtattttaaagataagaaatttaaaattagtgtatttttatatataagtagttatttttgtttatttgtggtttagatatgagtggagtgtgataagggataaattatttttgtgtattttttagtgatggggtgaaagtaatggatttagtttttgggagttgtttttgttgattttttttgttgtgatttgatttgtggtgattgtgttgttttttggttgttttttttgtttttgtaggtgtgtggggttattatttatgtgtgtattgtaggtttttgtgtatgatgttttagatgaagttgttatagaggttgtattatgtgtgtgtggtgggttttgtgggttggaagtggtggttatggttagggattagttgttgtgtggggttgtatgtggtgttttgtgtgatgtgtagtgtgttggtatgttttagttgggtgtggttttttttagtgtgtttagtgggtgttagtttttgtagtttaatgagtttaggtttttttgatatggtttggttgggtttgtgttttgttggttttgggtgttagtaagtgtgggttgggtggggttatagggtgggttttgattttagtgttttttttaggatttagattgggtggtgggaaggagttgaggagagttgtgtaatggaaatttgggtgtagggattgtggggtttgaaggtggggttgggtgtgtttttgtagagttttttttgttttgttttttttttttttttttgttttttttttatattttattttggatggttataatgatggtgattgtaaagtattatgtggagatatttgtgtttttggaggttagttttattgtgttagaggaagagggtttttatatttggttttggtttttttggtttggtttgttgaagtaatatatttggtttatttattgggtggggtaggaagttttgagtttttatttggggtgaggaggagggagattggttagtagttttattgtttgttttgttttttattgtggagattggggttttggtagaggttggattgtgattttgaggtttaggggtgtattttgggtggatttttttggtatgggtggttggtttttagtaattgtagtttttatttggttttgttattttgggttgttaggatataagtttttttatgttttttttagtgtttgatttggtattttttgtaggtaggtgggtattgaggatggtaatgtatgtgggggatgtgggagtagggtttagaggtttaaggttttaggatatttttatttgtagtaatattatttattttggtattgtgagtagtgtttagaagtttttgtattgtagtaagtatagtggggttgttttggagttattgtttttagtatatttagtttgtaggttttagtttatttgggggaaagttaggaaggtttgattggttttggaaggtgggggtattttatttatatttatgttttttgtattttttttattttttttgttatttttataggttttatttttgtgtttgtagttgtaggttttgttttgaggggttgaatatatgttggagttggtgtttggtaattgtttgttatttgtttttgtttttttgttttagttgtttttagatttttgggatttaggagagagaagtggagagtggtaggaaggtgttggtaaagtgggatagtggttttgagtagttaattttttagtgtttatttgttttaatattaggttttttttaggaggttgggttttagttagggttagatgggttaggaaattttgtaagtgggttaggttgggtagttggtttagtagtgtgtttgtgaggaaggtttgaagttgtaagggtgtttagtggaggttagtgtgatgtaggtgttggttagggggttaaggaaaaggaaggggttgggttgggttgagaatgtttgtgggggtttatgttttattagttggtgtgttatttgaggtttaaggattgaaaagagtattggggttgaggtgggtgggtaaagataaatagtagggatgtagttggggtaggatggggagggtggtattggggttgtgggggtt

SEQ ID NO: 385 - DNA, 11787 bp, Artificial Sequence
  chemically treated genomic DNA (Homo sapiens)
tgtgaaatattagttatgaagaaattttgataataatattttagtgtagaattgtatattagtaatagtatgtttggatttttttagatatgtggtattaatatatgtttggaattttaagtgttagattaagaagaaaaatttaagatataaagtggtgttttaataatttgagttttattatttttaatgttaagaaattattatatatataaattttatgtttgtaattttagatttattgttgtataggatttttggtaattataagttagttgtattaagtaaattttgatttatttggttggtggttttgtgaatgataattatttttaggtgggtttaatggaaggttggagaaggtattgtttgataagttatattttgttagttttagaattttgagtgaatgttgttgttttgttttgtttgtttttatattgtaaattggttatgagtttatttattatttttttttgttgtgaatttttagtaatatattttattaaaagattttttttgataaagtagatttttatgagttgaaatatttattgattttaatgtttatttttagatagttttgtataggaatttttatgtttaaggatagttgattttggtaaattggattttttaaaaattagattatagaatttttgtttgtaatttttttatttaaggaatatttagataatttggtttggagagaagattattaaatttttttttatataataggttttttttattaggtttgtaagggataaatagtgaatatttatttgtaattatgtaattgttttgtagagtaagtgtagttataagtggtaagaaatgaatgagtatggttgtgttttaattataattattatggatggatatatttgtattttttatgttagatggaattttgttttgttgtttaggttggagtgtagtgatgttattttgatttattgtaatttttgttttttaggtttaagtagttttgttttagttttttaagtagttgggattataggtgtatggttaatttttgtatttttattagagatggggttttattatattggttaggttggttttaaatttttgattttgtgatttgtttgtattaattttttaaagtgttgggattgtaggtgtgagttattgtgtttgatttaggattatatttaaatgatttataaatgtaaaaattatttttatattatagatttgatttaaggattgtagtttgttgtgtttttgttttttgaatgggatgtggtggtatagtagttgggattatagttatatattattatgtttatttaattttgtatttttagtagagatggggtattattatgtttattaggttgattttgaatttttgattttaggtgatttatttgttttaattttttaaagtgttgggattataggtgtgagttattgtgtttggtttgtatttttatttttaaattttagtatttttgaataataatgggtagagaaatatttgtagtagttgtttataatagagtgaaataaaaagtttgaggaattgttaatagaaaaatgggtggttgtggggagtattgggatttgtatttgtatataatttagggtagtttttaatgagtttatgagttatttagggattttattaaaatgagattagttttgagtggggttttttttatagatttttgttattatattttgaagagtaagggtttagttgattttaagtaggtgtgtatttttttggatagtgtttgtagaaaaatagaattatatttatggattttatgattatattgttagttttttggttaaggggttgagttaggtatttattgtagatagaaataaagtagatgtatgtttattagtgagtattgagatatttagtatggttatttatgaattgaagtttggtttttttttatttattaattgattattttttattttaagtaagtattttatattttgtatattagtatatttttggattttgtttttttatatggtttgatattttgaatattagattatttaagagtgagatttaatttatttttaaattgtttttaaaattagggaaataaaagagaatgaaattgtggtaattttttttttttttagttattagatgtatgttatttatggtgggttttggtttttttaaagataattggaagattttattggattgatagagagaaattgtgtaattttattttagtatgttaagatgaagaaatggggggatttgtagataggttaggagatatggtaagtaatatttttgatatatttttataaattattttagtgtttgtattattttatggttttatggatttttagggtggtattttgagtgttgttttgaaagtagtttttttttttatttattgtagagtgtatgaaggatatagaataattttatagaaattttttgttgtttgttgttaataaaattagtatatggtaaaggttaggtatttataatttgaagttaaagaagtttttattttgtgatttgtatataaatttttttttaaataggtggattttttttatattttatttggaattgttggattgttatttttgggagaagaatagattaaatttgttaattttgttttttgtatgtttgaagaagtgttttagagagtgaatgtttagtttgagttagtgagttagatttattgaattgaaagttgtatagtatagttttgttattttaatatttttgtatttgaagtgtttattgaatttaaaagtgattattgttaatattttgtatattgtgttaaattaattttaataaattatataattatatatattgtaaaataaagattggtattttattttttgttttttattttgaagttttgttattttgattatagttttttgtgtatatttttgtgtttgttatgtttaataattgagttaatataaaataattttaggtttttatttgattttttttttatgtatattttttatttgttttatagtaagttgatgtaaattggtttgttaataagaatgttaattgatgaaagtggatagaatttatatatgaattaaatgatgtataaaataaatggttgttgaaatttggaaatgattgataggtttgaatatggttattttgaattggttatagatttaggttaaatggtaatttattattttaaaatggggttgtgatttggattgttttttttttttttttttttttttttttttttagtattttatatattagaattatttaaagaaggagttgtttttaaataaggaaatattaatgggtaagttgatggttattatagtatttttttgtatttgttttttttttaaaaagttaaaatgggtataattatttttttttatttttttgtgatagaatttttgttgtttaggttggagtgtagtagtatgattttagtttaattgtaatttttgtttgttgggtttaagtaatttagttgtagttttttgagtagttgggattatagttgtatattattatgtttggttaatttttatgttattttagtatagatagggttttattatgttgaggagttggagattagtttgattttgtgatttatttattttggttttttaaagtgttgggattataggtgtgagttattatgtttggtttaaaatgagtataattattttaggggtttatagttttggtgaaagtgaggtattttttatttttaaattttattttttagagatagggttttttttttttttttaggttggggtatagtagtgtaattatagtttattgtaattttaaatttttgggtttaagtagtttttttattttagttttttgagtattagggtttataggtatttgttattatgtttattatgtttagttgattttttaattttggggataggtattgttttttttaggttggtttttggaggtgaagtaattttttggttttagttttttaaagtattgggattatagggaggagttattgtgtttgatttgaaaataaggttttttgatggaaattgagattttttttaagtatgtttggaatgttttgtgtaataattattttaagaatagagatgtttttaaggattgttgttattgtatgtgggtaaattgttgtgtataattggtttattgagatatttaatagtggtaggattttagtagtggtgtaaattaatgttttttaatagtttttgtatggtagtatttagataattttgttatgtttaatttatggatttttggtaagttggtattattggttttatttaaggaattttttaaaggttattattgtaaagttggagtttgaatttttagtgtgttattaattgatttatatgttagaaattatagtattagaaattggtagatggggaattgttaattgagagattttatttagttagtttttttttgttttttattttattatgtatatagttatgtgtatattattttttgataatataattattttttttatatttggttataagattaattttaggtgggttatgttgtgtgagtattatatgtttttattgtgttaaaggtattgggtgtattgtgttgggtggtttttatatttaaagataagttagtgtgtttggatgtgtgggaaatgtatgtaatatttgtaataagggagattgggtgttgtgagaataatggggttaataaattgggtggttattgatgggttttgtagagttttggttagtttgatatttgtaggttgaggatgttttagtgaggtttatgtggaaagtgatgggtttgggaatggttggaagtagggttatagatttgaagtatgtgaatttatgtggaaagttgagtttgtttgtgtttgtgtagtgtagtttagtgtgttggtgtgtagtttttttgtttgttttagtggtgtagtttttgtagttgggttattggaggggttgtttagaaattttatattttttgggttagggaaggtttgggaggatgttgaggtttgagattttattaattttgttttttgttttggtggtttttttgttgttgggagaaatttgtttattttagggtttttgttataattttggattttaggagattttatagagttgttttttggtttaggtggtttttgtatttatttgttttggtatgttaggagttgtgggtgattggagtagtagtagtagtagttttttttgttttgtgttaaatttttggttagtttaaggtaaggagtgattgggtggaggagtttttttgaggttagaggttggtagtttatggaggtttgggggtatgtgggtggtggttattatagtgaagttgtgatttggttggggtgtgagatttgagtgttttgggaatttggtgagtttgggtgattagaagttttgattttttaaattggttttattgtaagattttgattgtggatggtttagttttgagaaaggttgaagtattttatataatgttttttatagtgtttgataaatgatagtttgtgtgtgagtttgttgatagaagttgtgagttgatttttggttgttgaatttaattttttaaattttgttaaggtgggataaaatagattaaattgaatattttatttaatttagggaaaataatatgtttagtattaaaagagtgggttgggtggtggttgatgtttgtaattttagtattttgggaaattagggtgggtggattatttgaggttgggagttttatattagtttggttaatatggtgaattttttatttttattttttatttttattaaaagtataaaaattatttgggtgtggtggtatgtgattgtggttttagttatttaggaggttgaggtgggaggatggtgagtttgggaggttgaggttgttgtgagttgagattgtgttattgtattttagtttgggtgatatagtgagattttgatttaaaataaataaataaaaaagatgtatgttttttaaattatttattattttgttagtttttatttatgataaagtattattattttttatatatgattgtaatataatggtaaagtaataaatattaaatttaatggttattttttagtttattttatgtgatttttttgttgtatttaatgtttttaatttttttatttttagaaatagagttttgttatgttgtttatgttggttttaaatttttggttttaagtgtttttgttttggtttgtttaagtattgggattataggtatgagttattgttgtttggtttatgtttaatgtttttgattggtttttttttaaatttttttaatttggtttttttgattttatttgtttttgtttttttgttattttttagagaattgttgtgtttatttttgtttttaaattatgggtatgttattaaagtttttttttttaggttatttttatttagatgtgattatttttatagtttagattttatttatattttagatttattttagattgttttttgaagtttttattgatggattaatggatattttaggttgattatatgattaattaaatttttttttgtattttttttttttttttgagatagagttttgttttgttgtttaggttggagtgtagtggtatggttatgatttattgtagttttaaatttttgggtttaagtgatttttttattttagttttttgagtagttgggattaaggtatgtgtttttatagatggttaatttaaaaaatttttttgtagagatagtgtttttttatgttgtttagtttggttttgaatttttaggtttaagtgatttttttattttagttttttaaaatgttgggattataggtgtgagttattgtatttagtttttaaatttttaagtgtttttttatttttgtagtttatttattgtattattagagttatgtggaaaatgattttattatgttttttgttatttaaattagtagatttgtatttgtaggtaaaagattaaattttttagaaggatagttaaagtaattgggattggtttttaatttttatagatttattttttattatttaatatttattttgttttttaataaaattgagttatttgtaatttttttaaagtaatatgaatgtttatattgttagtttaatttttttttttattagatgtttggttatttatttatttattagtaatgataatatttattaatttatatgtatttattttgttttggttttttattaggtagatggtatttttgatttttataataattttgtagagtagattttttttttgtttttgttttatagatagaattaaggtttaaataggtgaataaaggtttaaattatgttagtagttggggataataatttgtgtttttaatgaatttaaggtttagtagagaagatagatttaaaaattaataaatatatatttaagaaataattgtatttgaggtatttataatttttgaggtaggtataattaaagtatggggataaaagtgggaaaagatattttatagagtaagtgtattttgaattggtttttaagaataagtaggaagaagaatgttagttaaagggaaatagttggagtgtatttttgagaaaaatatgtgtaaaggtatagaagaattatgtaaaattgttaataattttgtttggttagagtaggagagtgatttaggtagataaatttgaatgtagatatagttgtgagaattagatttgggagataaatttaatttagagattttttatatttaatattaggtttttggttttggtgattggatagatggtagtagtattttttgattttgggaattttgtaggtaaagtaaattttagagggaagatgatgagttttgttatggatatgttgagtgtgaaaagtttgtgggatatttatatatttatattaagataattgaatataggaaattagagttaagaagagagaaatttgagggaaatatggatttgaaagttattagtatgttgggattatagtagagaatatgaagattatatagtaaaatagaggttaaggaagtaggaggagaattaagataagtgaatgagttttaagaaagggtatatagtttaaaagtagtttgagaataagaaatagttttttttatttttagtttttgtatttttagtttttggtaattatttttttttttagttttttaaagtttagaaatgttaatggagtatattttatgttggttttatatatgtttttatgatagtatttttatattttgtttatatttttgtaaatattttttttattaaattattttagtttgagtatattattgatttttgttggaatttatataatgaagttatattttattttatggtgagtatggggagatatataggaattgtaagaaagagagatattgattagatttgttttttagaaagattattggtgatgatttgaagaatagattagagaggtgtaatattggaagtaaggagaagaagaagtaggaaatttgtataaggattaaagaagatataggtttaaaatgggttgggaggagtagagagggatttaaattttagtgatgttaaaaaaaaagaattttagtatttagttattgagtgttagggttgatgaaggaagaattgagaatgttttttaagtttatgatttgagtgataagggataagttggtataattaattatattggtaataaagaattaattttgagggaaagatagagtttatttttggatatttagaatgttgggaagatatttaaaggtttatgtttaagagatagatatagtgatttggagttatattgtttgatagaatattttgtgataatagaaatgttttatatttatgttgtttgatgtggtaattagtagttgtatgtggtttttgagtatttgaaaatgttgttagtgtgattgaggaatagaatttaaattgtatttaattttgatttagttaaatatttatatatgttgttttattgaataatgtaggtatagagttgagaatggtttttgtatttttgaaggattaaagaattaagaatattttgtgatattaaaattatatgaaatttagaatttaatatgtagaaataaagttatttttaattgaaatatagttatttttatttatttatgtattatttatgattgtttttttatgatagtgttagagttgagtaattgtgatagtgattatatggtttataaaagtttaaaatatttgttatttggttttttatttaaaagtttatgggttgggtatgatggtttatgtttataattttagtattttgggaggttgaggtgggtagattatttgaggttaggagtttatgattagtttggttaatatgataaaattttgtttttattaaaaatataaaaaaaaaatagttaggtgtggtgggtatgtttataatgttagttgtttgggaggttgaggtaggaggattgtttgaatttgggaggtagaggttgtagtgagttgagattgtgttattgtattttagtttgggtaataagagtgaaattttattttaaaaaaaaaaaaaaaaagtttatgttgaggtatggtggtttatgtttgtaattttagtgttttgggaggttgaagtgggaggattgtttgaggttaggtgtttgagattagtttgggtaatgtagtaagattttgtttttataaaaaaaaaattagttgtgtgtggtgaggtgtatttatagtttatagttatttaagaggttgaagtaggaggttatttgagtttatgagtttgaggttgtagtgagttgtgattatattattgtattttagtttgggtgataaagagagattttgtttttataagatagtaaaatagattgggtatggtggtttttgattataattttagtattttgggaggttgagatgggaagattatttgagtttaggagtttgagattagtttgggtaatatggtaaaattttatttttataaaaatataaaaaattagtttggtatggtggtatgagtttatagttttagttatttgggagggtgaggtaggaggattgtttgagtttaggagtttaaggttgtatttagttaagattatattattgaattttagtttaagttatagaatgagagttttatatatagataaaaaggaaaaattaaaagtttagtaatttttggtttatagtttaaggagttgttatagttatatatgaaggtttgagagttgttagaaaatagatgttaatagaaataaagaggagagatgagatgtttggagatgtataatgttgatttgtgagggaaagtttaaaagtatgaagttttggaggttaatagttaagaagtagaggaaaaaggagatggtaaaggaaattaaaagtggtttaaagagaatttaagatagagagttgtggaaattaaagagaataggtgaatagagtttaaatattttaaaatttttttagaatttttatgtgttaagaggttatgttaggttgtttatgtatattatttaaaaattttatgataattttgtaaaataggtaatagtttatattagtagataagtatttaaataaggaattgaagttaattgagtttaaaatgttatttgtataggggagagaaatttaatgaagaaattaatagaagaaggttaaaagaggtttaataattattatataaatgaaatatatgttttagtttgtattttgttgtttttaaaagaatatttgaaattgggtgattattaagaaagaaaatatattttttggaagtttggaggttgggaagtttaaggttaaaggaggtatatttagtgagggtttttgtgttggtggagtttttgtagagttttgtagtggtatagggtattatatggagagggagttgagtatggtagtttaggttttttattttttttttataaaattattagttttatttttgtgataatttattaatttattaaattatgaatggattaatttatttatgaaggtagagtttttatgttttattattttttaaaggttttatttttgttttgttatattttattggggattaaattttaatgtaagttttggaggggatagatatttatattttagtaatatatttggtatatttgaagattaaagggtaatttatgattttagttagagtagttgtagtgaatttgtagaggtaaaagttatattagtatatttttgtatatttattaataatgttattaattttgttataatttgtttatttttaaaaattatttttatatgaaattttatagaaagtgaatatagtggttgggtgtggtgatttaggtttttaattttagtattttgggaggttgaggtaggtagattatgaggttaggaatttgagattagtttagttaatatggtgaaattttatttttattaaaaatataaaaatttattaggtgtggtggtgggtgtttgtaattttagttatttgggaggttgaggtaggaggattatttgaatttgggaggtggatgttgtagtgagttgagattatgttattatgttttagtttgggtgataagagtaagattttgttttaaaaaagaaaaaaagaaaaaaaaggaaagtgaatatggtataaattataatgattaatatattattgtataatttaaatttttaagaattgattgttaattttttaaatttagg

SEQ ID NO: 386 - DNA, 11787 bp, Artificial Sequence
  chemically treated genomic DNA (Homo sapiens)
tttaaatttgaaaaattaatagttaatttttaaagatttgaattatgtaatgatgtattagttattataatttatattatgtttatttttttttttttttttttttttttttttgagatagagttttgtttttgttgtttaggttggagtgtagtggtatgattttggtttattgtaatgtttattttttaagtttaagtgatttttttgttttagttttttgagtagttgggattataggtatttgttattatgtttggtgaatttttgtatttttagtagagatggggttttattatgttggttgggttggttttgaatttttgattttatgatttgtttgttttggttttttaaagtgttgggattagaggtttgagttattgtatttaattattatgtttattttttataaaattttatgtgaaaatgatttttgaaaataaatagattataataaaattaatgatattattgataaatatataaaaatatgttaatatagtttttgtttttataagtttattgtaattattttggttaaaattataaattattttttaatttttaaatatattagatgtgttgttaaggtatgaatatttgttttttttgaaatttatattgaaatttaatttttagtgaagtgtggtaggatagaggtggggtttttaagaggtgatggggtatgagggttttgtttttatgaatgaattaatttatttatgatttaataggttaatgggttattatgagagtaggattggtggttttataagaagaggatgagagatttgagttattatgtttagttttttttttatgtgatgttttgtattattataggattttatagagattttattagtataaagatttttattaaatgtgttttttttgattttggattttttagtttttagatttttaagaaatatgtttttttttttgataattatttagttttaagtatttttttaaaagtaatagaatatagattaagatatatgttttatttgtataataattattagattttttttaatttttttttgttaatttttttattgaattttttttttttatgtaaatggtattttagatttaattggttttagttttttatttaggtatttatttattgatgtaagttattatttattttataggattgttataaaatttttaaataatgtatataaataatttagtatagttttttggtatatagaagttttaaaaaaattttaaaatgtttgggttttgtttatttattttttttgatttttataattttttattttgaattttttttaaattatttttagttttttttgttatttttttttttttttgttttttaattgttggtttttagggttttatatttttaagtttttttttataaattaatattatgtatttttaggtattttattttttttttttgtttttattaatatttattttttgataatttttaagtttttgtatatagttgtaatgattttttaaattgtaaattaggggttgttaaatttttaattttttttttttgtttgtatgtgagatttttgttttgtagtttaggttggaatttagtggtgtgattttggttaaatgtagttttgaatttttgggtttaagtaatttttttattttatttttttgagtagttgggattataggtttatgttattatgttaggttaattttttgtatttttgtagagatggggttttgttatgttgtttaggttggttttaaatttttgggtttaagtgatttttttattttagttttttaaaatgttgggattataattgggagttattatgtttagtttattttattgttttataaagataaggtttttttttgttgtttagattggagtgtagtagtgtgattatagtttattgtagttttaagtttatgggtttaagtaattttttgttttagttttttgagtaattatggattataggtgtattttattatatatagttaattttttttttatagagatagggttttgttatattgtttaggttgattttaaatatttggttttaagtaatttttttattttagttttttaaagtattgagattataagtataagttattatgttttagtataaattttttttttttttttttgagatggagttttatttttgttgtttaggttagagtgtaatggtgtaattttagtttattgtagtttttgttttttaggtttaagtaatttttttgttttagttttttaagtagttggtattataggtatgtttattatatttggttattttttttttgtatttttaatagagatagggttttgttatgttggttagattggttatgaatttttggttttaggtgatttgtttattttagttttttaaagtgttgggattataggtatgagttattatgtttagtttataaatttttaaataaaggattagatggtaaatattttaggtttttgtgggttatataattattgttataattatttagttttgatattattatagaaaagtagttatagataatatataaataaatgagaatggttatgttttaattaaaaatggttttatttttatatattgaattttaaattttatataattttaatattataaaatatttttgattttttaattttttaaaagtgtaaaaattgtttttagttttatatttgtattgtttaataaagtagtatatgtgagtatttaattaaattaaaattaaatataatttaaattttgttttttagttatattagtaatatttttaaatgtttaaaagttatatatggttattagttattatattggatagtataagtatgaaatgtttttattattatagaatattttattagataatgtagttttaggttattatatttattttttgggtataaatttttaggtatttttttagtattttaaatgtttaaaagtgaattttattttttttttaaaattaattttttattattagtatggttaattgtattagtttgttttttgttatttaagttataagtttaggagatatttttaattttttttttattaattttaatatttagtgattgagtgttagaattttttttttttaatattattaaaatttaaatttttttttattttttttagtttattttaagtttgtattttttttggtttttgtgtaagttttttatttttttttttttttgtttttagtattatatttttttaatttattttttgaattattattaataatttttttgaaaagtaaatttgattagtattttttttttttataatttttatgtgtttttttatatttattatagggtaaaatataattttattatatgggttttagtaggaattaatgatatatttaaattgggataatttgataaagagaatatttataaaggtgtggatagggtgtaggggtgttattataaagatgtgtgtagaattagtataaaatgtgttttattagtatttttaggttttagggagttaaggaagagagtggttgttagaaattggagatgtggaaattggagatggagagggttgttttttgtttttagattatttttagattatatatttttttttgaaatttatttatttgttttaattttttttttatttttttgatttttattttgttatatagtttttatattttttgttgtggttttaatatattggtaatttttaaatttatattttttttaagtttttttttttttagttttagttttttatatttaattattttaatataaatatatggatattttataggttttttatatttagtatgtttataatagagtttattattttttttttaaaatttgttttgtttataaaatttttagaattagaaaatattattattatttatttagttattaaaattagagatttggtgttgaatatggggggtttttgggttaaatttgttttttagatttaatttttataattatatttatatttaagtttatttatttagattatttttttgttttagttaagtaaaattattagtagttttatatgatttttttgtgtttttgtatgtgttttttttaagaatgtgttttagttgtttttttttggttggtatttttttttttatttatttttgaagattagtttaaggtgtatttattttgtgaaatgtttttttttatttttgtttttatattttaattatatttattttaaaaattataaatattttaaatatagttattttttaaatgtgtatttgttgatttttaagtttgttttttttattgaattttaagtttattgagagtatagattattatttttagttgttaatataatttgaatttttgtttgtttatttgggttttggttttatttgtaaaataggaataaaaaaaaaatttattttgtaaaattattgtgaggattaaagatattgtttgtttagtaagaagttagaataaagtaggtgtatataaattagtgaatgttattattattgataaataagtgggtgattaagtatttgatgaagagagggattagattgataatgtgaatatttatgttgttttaaaggaattgtaagtagtttagttttgttagaaagtagggtaaatattaaatgatgagggataaatttgtaaagattagaaattgattttaattgttttggttatttttttagagagtttgattttttatttgtagatataggtttattgatttaagtggtaagggatatgataagattattttttatataattttggtggtatagtaagtaagttataaggatggaagaatatttaagagtttgagggttaggtgtagtggtttatatttgtaattttagtattttgggaggttgaggtaggaggattgtttgagtttagaagtttgagattaggttgggtaatgtaggaaaatattgtttttataaaaaaattttttaaattagttatttgtaggggtatatgttttggttttagttatttgggaggttgaggtgggaggattgtttgagtttaggaatttgaggttgtagtgagttatgattatgttattgtattttagtttgggtaatagagtaagattttgttttaaaaaaaaaaaaaaagtgtagagaggaatttaattaattatatagttagtttgaggtatttattagtttattaataaaaattttagaagatagtttgaagtaagtttggagtgtagatgagatttgagttgtggagatagttatatttaggtagaagtggtttaggaaaaaaagttttaatgatatgtttataatttgggaataaaggtgggtatagtaattttttgggaggtagtagaaaaataggggtaagtggaattaaggaagttaaattaaaagagtttaagagaagattagttaagaatattaaatataggttaggtagtagtggtttatgtttgtaattttaatgtttgggtagattgaggtaggagtatttgagattaggagtttgagattagtatgggtagtatagtgagattttgtttttaaaaataaagaaattaagaatattaaatatagtagaaaggttatatgagatgaattgaaaaatgattattggatttggtatttgttattttattattgtgttgtaattgtgtgtgaaaaatggtgatgttttgttatgaatagagattaataaaataataaatgatttgaaggatatgtattttttttgtttgtttgttttgagttagggttttattgtgttatttaggttgaaatgtagtggtgtaattttagtttatggtagttttgattttttggatttgttatttttttattttaattttttgagtagttgggattatagttatgtgttattatatttagataatttttgtatttttagtagagataggggatgggggtgggaggtttattatgttggttaggttggtgtggaatttttggttttaagtgatttgtttattttggttttttaaagtgttgggattataggtgttagttattgtttagtttatttttttaatattaaatatattattttttttgaattagatgaaatgtttaatttaatttattttattttattttagtaggatttggagaattaaatttagtagttaaagattagtttataatttttattagtaaatttatgtataaattgttatttgttagatattgtgagggatgttatatgggatattttagttttttttagaattgagttatttatagttaaggttttgtaatagaattaatttgaaaagttaaggtttttaattatttagatttattaaatttttagggtatttagattttatgttttaattaaattataattttattgtggtaattattatttatgtgtttttgagtttttatgaattgttggtttttagttttaaggagatttttttatttaattattttttgttttgagttggttgggagtttggtgtggggtagggaaggttgttgttgttgttgttttggttgtttgtagtttttgatgtgttaggataggtggatgtagagattatttggattgaagggtggttttgtggagttttttggagtttgaaattgtagtggggattttgaggtgagtgggttttttttgatgatggggaaattgttggggtagaaggtgaggttgatgagattttaggttttagtatttttttaaattttttttgatttgagaagtatgaggtttttgagtgatttttttagtagtttaattatagaagttgtgttgttgaaatgggtgggagaattgtgtgttgatgtattaagttgtattgtgtaggtgtaggtaggtttagttttttatatggatttatgtattttaggtttatgattttgtttttagttatttttaaatttattattttttatatgaattttattggaatatttttagtttgtaggtattagattgattagaattttgtaaggtttattaatgattatttgatttgttagttttattatttttatagtatttaattttttttattgtaaatgttatatgtattttttatatgtttaagtatattagtttatttttaaatgtagaaattatttaatatagtatatttagtgtttttgatataatgagaatgtgtaatgtttatatagtataatttatttaaggttgattttgtgattaaatataggaaagatagttatattattaaaagatagtatgtatatggttgtgtgtatagtagagtaggaaatagggaaagattgattgggtaagattttttagttaataattttttatttattaatttttagtattgtggtttttaatatataaattagttaatggtatattagaagtttaaattttagttttgtagtggtgatttttagaaaattttttaaataaggttaatagtattaatttattagagatttatggattaaatatgatgaaattatttggatattgttatatagaagttattagaagatattaatttatattattattgaaattttgttattgttgagtattttaataaattagttatgtatagtggtttatttatatgtagtgataatagtttttaagaatatttttgtttttggaatgattattgtatagggtattttaaatatatttgagaaaaattttaatttttattaaaaaattttatttttagattgggtatgatggtttttttttgtaattttagtattttgggagattgaggttagaggattattttatttttggagattagtttggggaagatagtgtttgtttttaaaattaagaaattagttgggtatagtgggtatggtggtaggtatttgtagattttggtatttaggaggttgaggtggaaggattgtttgagtttaggagtttaaggttatagtgagttgtgattgtattattatgttttagtttggggaagaaaggaagattttgtttttaaaaaataaaatttaaaaatagagaatattttatttttattaaaattgtaaatttttagagtgattgtatttattttaggttaggtgtggtggtttatgtttgtaattttagtattttgggaggttgaggtgggtggattataaggttaggttggtttttagttttttagtatggtgaaattttgtttgtattaaagtaatataaaaattagttgggtatggtggtgtgtggttgtagttttagttatttgagaggttgtggttgaattgtttaaatttggtagatggaggttgtagttaagttgagattgtgttgttgtgttttagtttgggtaatagagattttgttataaaaaaataaaaaagagtgattgtatttattttagttttttaagaaaaagataggtgtaaaaaaatattgtggtgattattaatttatttgttagtgtttttttatttgaagataattttttttttgggtaattttgatatataaaatgttaaaaaaaaaaaaaaaaaaaaaaaaaaaaaggatagtttgaattataattttattttaagatggtagattgttatttaatttaagtttgtgattaatttagaataattatatttaaatttattaattatttttaaattttaatagttatttattttgtgtattatttaatttatgtatgggttttatttatttttattagttaatatttttgttgataaattaatttatattaatttgttatagaatagatgaaaggtatatatgggggaaaaattaagtagaaatttagagttattttatgttagtttagttattgaatataatagatatagaagtatatataaagaattgtagttagaataataggattttagaataaaaagtagaaaataaaatattggtttttattttataatatgtataattatataatttattaaaattaatttaatataatatataaaatattaatagtagttatttttagatttgataagtattttaaatatagaaatgttaaaatggtaaaattatattatgtaatttttaatttaatgaatttagtttattagtttaggttgaatatttattttttgaagtatttttttaggtatgtaaaagataggattaataggtttaatttgttttttttttaaaagtgataatttagtaattttaaataaggtatgaaaaggatttatttatttaaaaaagaatttatatatagattataaaatgaaaatttttttaattttaaattatgaatatttgatttttattatatattaattttgttagtaataagtgataagaaatttttgtaagattgttttatattttttatatattttataataaatagaaaaaaaaattgtttttaaagtaatatttggaatgttattttggaaatttatggaattatgaagtaatgtaaatgttgaaataatttatagaaatatgttagaaatattatttgttatattttttggtttgtttgtaaatttttttgtttttttattttgatatgttaaaatgaaattatgtagtttttttttattaatttaatgaagttttttaattatttttagggaagttaggatttattatgagtagtatatatttggtaattaggagggaaaaaagttgttataattttatttttttttatttttttaattttgagaataatttaaaagtgggttaagttttatttttaggtaatttgatgtttaaagtgttaaattatgtggaaggatgaaatttagggatatattgatatgtagggtatgaaatatttgtttagaatgaaagataattaattaatgggtaagaagagattaaattttaatttataggtaattatgttaaatattttagtatttattgataagtatgtatttgttttgtttttatttgtaatgaatgtttaatttagttttttaattaagaagttagtagtataattatgaaatttatgggtatagttttgtttttttataagtattgtttaggggggtatatatttgtttaaaattaattaaatttttgttttttaaaatatggtgatagaagtttataaagaaaattttatttaaggttgattttattttaatgagatttttgagtaatttatagatttattagaagttgttttagattgtgtgtaagtgtaggttttggtgttttttatggttatttatttttttgttgatagttttttaggttttttattttattttattgtagatagttattgtgggtgtttttttatttgttgttatttagaaatattaaggtttaaaaataaaaatataggttgagtatagtggtttatgtttgtaattttagtattttgggaggttgaggtgggtagattatttgaggttaggagtttaagattagtttgatgaatatggtgatattttatttttattaaaaatataaaattggatgggtgtggtggtgtatgattgtaattttagttattgtattattatgttttatttagagggtaggggtatagtaagttataatttttgagttaaatttatagtgtaggaatagtttttatatttataaattatttaaatatagttttgggttaggtatggtggtttatgtttataattttagtattttgggaggttgatgtaggtagattatgaggttaggagtttgagattagtttggttaatatggtgaaattttgtttttaataaaaatataaaaattagttgtgtgtttgtagttttagttatttgggaggttgaggtagaattgtttgaatttgggaggtggaggttgtagtgaattaagatggtgttattgtattttagtttgggtaatagagtaagattttatttgatataggaaatataagtatatttatttataataattgtaattggaatatagttatatttatttattttttattatttatggttgtatttgttttataggataattatatagttgtaaatgagtatttattatttgttttttatagatttgataagagagatttattatgtggaggaaaatttaataattttttttttaaattaaattatttgggtattttttaaataagaagattgtaaataaaaattttgtagtttaatttttaaaaaatttaatttgttaaaattaattgtttttaaatatggagatttttgtataagattgtttggaaatggatattaggattaatgagtattttaatttatgggggtttattttgttaaggggagttttttagtaggatatattattgaaaatttataatagggaaaggtaataaataagtttatggttaatttataatatagaaataggtaagataaagtagtagtatttatttaaggttttaaagttagtagaatatggtttattaaataatattttttttggttttttattgagtttgtttgagggtaattgttgtttataaagttattagttaagtaaattagaatttatttgatgtaattgatttgtaattgttagaaattttgtgtaataatagatttaaaattatagatataaagtttatgtgtataataattttttgatattaaaagtgataaaatttaaattattaaaatattattttatattttaagtttttttttttgatttgatatttaaaattttaaatatgtattaatattatatatttgaaaaaatttaagtatattattattagtatgtaattttgtattgaaatattattgttaaaatttttttatggttagtattttata

SEQ ID NO: 387 - DNA, 2455 bp, Artificial Sequence
  chemically treated genomic DNA (Homo sapiens)
ggagtgtaagaatatagaattaaaatagagtttgaaatttaaagaaagggagagatttgggggaggagtggggtggagtgatgtgatgtgttgttggaaattagtagttggtggtttttttttgtgtttttttttttgtgggtttttttttgtttgtgggagggtttttttttttttttttgatagaaaggttatttttggtgtttgtttttttgaattgtaatattttgtaagggtatgattttatgtttttgtgtgggtgtgaatttttttatggtgatttttaaaatttgtatataggatttttttttattgaggggaggggattaaaataattttattttttagggtttttttttgttttaattggtttgtgtttaagagaagttttaggtaaatggggttagtttgaagattaaataggtttggtagttttttttggtttttttttttttttttatagttttatagttatagttgttttgatattaatattgattttggttggttggtatgattatttatagggtattgtgttttaatttattaggtgataggtaatgttgtttttttttggaattatttagtagagttagggttgtatttttaaattttgtaatagaggtttttttttattttatttttttgtttttgtattttttttattttagtagtttttttttttttttttgggtttttttttttatttttttttttttttgggtttggtaaattagtttttaatttttttatattttagattggaaggtgggtttttttttgatattttttagagttgttattaattttttttaagtttttatagttttattgtttaatagatttgttaggggtaattattaatttagtttttaattttgtttttttattttttttgttggaggggattttttaattattggttagtatagttaggttattttatttttattattttttttaattttttgggttggggggttggggaggaatttttttattttagggtattaggaataaagttggggaggatggtgtatttaaagggattatatatatatatatatatatttttttttttttttttttataattttatttttgtaatatatatatatatatatatatatatatatatatatatatatatagatgtataaataagttttatggagtagtgattttattatgtttattgttttgagtttaatttttggtttaaaataggtattaaatagttgttgaatgtatgaatgatagatatttttttgtttttaggggtgtgtagaagtgtgaaggggtatgggtatgttttagtaggggtgtgagtgttttgattagaattatttttttttgttagaatttgatgtaatttgaatgtttttatttttgtttgaagggtttaaataataaattaggttttgttgtgttattatgggggtggttatattttgtatttaggaaataggtatggtagggttgagatagaagttttgtttgtttttgtttatttatttgaaatattgtttatttaggttttattttgtttgttaggtattgttttaagttttgtataaatattaatttagagggtataaatattaatttaagagttgttgtaggaaaaaaaataagtgtttttggttttttaagtttggttttttttttaaaatttttgtaatggttttaaattttttttagggattgggattatggattttggtttgatttttttgtgggttttttattgtgttaattaaattttagaaatagtgagtgttagaggtttggttgttaagtaatggtagagggtgggaagtttgaatgttttggatttgttttgaaggtaaataggttaattagtgtttagattttttagttatggtagtttgttttttttttttgttttgttggatttttaggttggatttgggtttttttaattaatagtggttaggagggtggggtgtgtgtgtgtgtattttgtttatgtgttggtgtgttttttttgtaggtttgtggtggttggttagtggggtgtttttttatttgtagtgatttaggttattgaaaaggtgggaaaatgttgtgatggtggtagttgggggaggaggaagataagtgtgtgaggttggggttttggtgtgtggttggtagaggtagagatataagatgtgtatgatttgttttatagggtttttagattttttttttttaaagggtaatttttgtgtgataggaatgagggtggggtgtgtggagttttttataatttgtattttagttaaatatttgagaatttattttttgtgtttatagttttttatgttttttagttttgttttgtagttttgtagtagaagtatttagtgttttgtattttgtgtgttattttattttggttttttttgtgaattgttgtttttgaattgtttttattttttgtatttgtaga

SEQ ID NO: 388 - DNA, 2455 bp, Artificial Sequence
  chemically treated genomic DNA (Homo sapiens)
tttgtggatgtaaaaagtgagggtggtttggaagtaatgatttatagaggaggttggggtagggtggtgtgtagaatgtaaagtattaagtatttttgttatagggttgtggggtagggttgaggggtgtggagagttgtggatataggaggtgaatttttgggtatttaattaaagtatagattgtgggaaattttatgtgttttatttttatttttgttatgtggaggttattttttggaaggaaggggtttgagggttttgtggggtgagttgtgtatgttttatgtttttgtttttgttaattatgtgttaggattttagttttatgtgtttatttttttttttttttagttgttgttattgtagtgtttttttgtttttttagtaatttgagttgttataggtgggagaatgttttgttgattgattgttatgagtttgtaaaaggagtgtgttggtgtgtgagtgaggtgtgtgtgtatgtgttttgtttttttagttgttgttgattggagaggtttggatttagtttagagatttgatagggtgaggaggagaagtggattgttgtagttgaagagtttggatgttgattggtttatttgtttttggggtgggtttagaatgtttaaattttttgttttttgttgttgtttagtagttgggtttttagtatttattgtttttgggatttgattggtgtagtgggaagtttgtgagaaggttggattagggtttgtagttttagtttttggaaggggtttgggattgttgtgggggttttgagggggaggttaaatttaaagagttagaggtgtttatttttttttttgtaataatttttaagttaatatttgtattttttgagttaatatttatatagagtttagaatagtgtttggtaaataaagtaagatttaaatgagtggtgttttaaataaataagtggaaataagtaggatttttgttttagttttattgtgtttgttttttgggtatagggtatgattatttttataatggtatgatagggtttaatttattatttaaattttttaagtagaggtggaagtatttgaattatattaaattttggtagagagaagtagttttgattagaatatttatatttttattgggatatgtttatatttttttgtatttttatatatttttgaagatagagaggtatttattatttatgtatttggtaattatttagtgtttattttgggttaggggttggatttaaagtggtgaatataatgaagttattgttttataaagtttatttgtgtgtttgtgtgtgtgtgtgtgtgtgtgtgtgtgtgtgtgtgtgtgtgtgttgtgggggtggggttatgagggagaaagaaaaaaaatatatatatatatatatataatttttttaaatgtattattttttttagttttgtttttagtattttgagatggggagatttttttttagttttttaatttaagaagttaggaaagatggtgggggtgagatgatttagttgtgttaattagtaattggaaaattttttttagtaagaaaggtgggggaatagagttaagggttgggttaatggttatttttggtaaatttgttgagtaatggagttatagaaatttggaggaggttggtgatagttttggggagtgttagggagggatttattttttaatttggggtgtgaagagattagggattagtttattaagtttaggaaggggagggagtggaaagagaagtttagagagggaaagaggagttattgagataggagaaatgtagggatagggaggtgagatggagggaaatttttgttgtaggatttgggggtatagttttggttttgttggatggttttaggagagggtagtgttgtttgttatttggtaaattaaggtatgatattttgtgggtagttatgttagttagttaaagttaatattgatattaaggtagttgtagttataaagttgtaggagagaaaagagaggttgggagaggttgttaaatttgtttgatttttaagttggttttatttatttaaggttttttttggatatagattagttggaataggagaggattttgagaagtagagttgttttgattttttttttttaatgggaaggggttttgtgtgtagattttgagggttattatgagggaatttatatttatatagaggtatggaattatatttttataggatgttatagtttaagggaatgaatattaaagatagtttttttgttgggaggagagaaaaaggtttttttataagtaggagaaaatttatagaagaggaagtataagaggaaattattaattgttggtttttagtagtatattatgttattttattttattttttttttaagtttttttttttttttaagttttaagttttgttttagttttgtgtttttgtatttt

SEQ ID NO: 389 - DNA, 28 bp, Artificial Sequence
  Detection primer for MDR1
taagtatgttgaagaaagattattgtag

SEQ ID NO: 390 - DNA, 28 bp, Artificial Sequence
  Detection primer for MDR1
taaaaactatcccataataactcccaac

SEQ ID NO: 391 - DNA, 20 bp, Artificial Sequence
  Detection primer for APOC2
atgagtagaagaggtgatat

SEQ ID NO: 392 - DNA, 20 bp, Artificial Sequence
  Detection primer for APOC2
ccctaaatccctttcttacc

SEQ ID NO: 393 - DNA, 23 bp, Artificial Sequence
  Detection primer for CACNA1G
gggatttaagagaaattgaggta

SEQ ID NO: 394 - DNA, 20 bp, Artificial Sequence
  Detection primer for CACNA1G
aaaccccaaacatcctttat

SEQ ID NO: 395 - DNA, 20 bp, Artificial Sequence
  Detection primer for EGR4
agggggattgagtgttaagt

SEQ ID NO: 396 - DNA, 20 bp, Artificial Sequence
  Detection primer for EGR4
cccaaacataaacacaaaat

SEQ ID NO: 397 - DNA, 20 bp, Artificial Sequence
  Detection primer for AR
gtagtagtagtagtaagaga

SEQ ID NO: 398 - DNA, 20 bp, Artificial Sequence
  Detection primer for AR
accccctaaataattatcct

SEQ ID NO: 399 - DNA, 23 bp, Artificial Sequence
  Detection primer for RB1
tttaagtttgtttttgttttggt

SEQ ID NO: 400 - DNA, 22 bp, Artificial Sequence
  Detection primer for RB1
tcctactctaaatcctcctcaa

SEQ ID NO: 401 - DNA, 22 bp, Artificial Sequence
  Detection primer for GPIb beta
ggtgataggagaataatgttgg

SEQ ID NO: 402 - DNA, 20 bp, Artificial Sequence
  Detection primer for GPIb beta
tctcccaactacaaccaaac

SEQ ID NO: 403 - DNA, 24 bp, Artificial Sequence
  Detection primer for MYOD1
attaggggtatagaggagtattga

SEQ ID NO: 404 - DNA, 22 bp, Artificial Sequence
  Detection primer for MYOD1
cttacaaacccacaataaacaa

SEQ ID NO: 405 - DNA, 20 bp, Artificial Sequence
  Detection primer for WT1
aaagggaaattaagtgttgt

SEQ ID NO: 406 - DNA, 19 bp, Artificial Sequence
  Detection primer for WT1
taactaccctcaacttccc

SEQ ID NO: 407 - DNA, 22 bp, Artificial Sequence
  Detection primer for HLA-F
ttgttgtttttaggggttttgg

SEQ ID NO: 408 - DNA, 22 bp, Artificial Sequence
  Detection primer for HLA-F
tccttcccattctccaaatatc

SEQ ID NO: 409 - DNA, 24 bp, Artificial Sequence
  Detection primer for ELK1
aagtgttttagtttttaatgggta

SEQ ID NO: 410 - DNA, 20 bp, Artificial Sequence
  Detection primer for ELK1
caaacccaaaactcacctat

SEQ ID NO: 411 - DNA, 22 bp, Artificial Sequence
  Detection primer for APC
tcaactaccatcaacttcctta

SEQ ID NO: 412 - DNA, 25 bp, Artificial Sequence
  Detection primer for APC
aatttatttttagtgttgtagtggg

SEQ ID NO: 413 - DNA, 22 bp, Artificial Sequence
  Detection primer for BCL2
gtattttatgttaagggggaaa

SEQ ID NO: 414 - DNA, 18 bp, Artificial Sequence
  Detection primer for BCL2
aaaaaccacaatcctccc

SEQ ID NO: 415 - DNA, 20 bp, Artificial Sequence
  Detection primer for CALCA
gttttggaagtatgagggtg

SEQ ID NO: 416 - DNA, 21 bp, Artificial Sequence
  Detection primer for CALCA
ccaaattctaaaccaatttcc

SEQ ID NO: 417 - DNA, 19 bp, Artificial Sequence
  Detection primer for CDH1
gaggttggggttagaggat

SEQ ID NO: 418 - DNA, 25 bp, Artificial Sequence
  Detection primer for CDH1
caaactcacaaatactttacaattc

SEQ ID NO: 419 - DNA, 21 bp, Artificial Sequence
  Detection primer for CDKN1A
ggattagtgggaatagaggtg

SEQ ID NO: 420 - DNA, 21 bp, Artificial Sequence
  Detection primer for CDKN1A
aaacccaaactcctaactacc

SEQ ID NO: 421 - DNA, 19 bp, Artificial Sequence
  Detection primer for CDKN1B (p27 Kip1)
gtggggaggtagttgaaga

SEQ ID NO: 422 - DNA, 20 bp, Artificial Sequence
  Detection primer for CDKN1B (p27 Kip1)
atacacccctaacccaaaat

SEQ ID NO: 423 - DNA, 20 bp, Artificial Sequence
  Detection primer for CDKN2a
ttgaaaattaagggttgagg

SEQ ID NO: 424 - DNA, 20 bp, Artificial Sequence
  Detection primer for CDKN2a
caccctctaataaccaacca

SEQ ID NO: 425 - DNA, 20 bp, Artificial Sequence
  Detection primer for CDKN2a
ggggttggttggttattaga

SEQ ID NO: 426 - DNA, 20 bp, Artificial Sequence
  Detection primer for CDKN2a
aaccctctacccacctaaat

SEQ ID NO: 427 - DNA, 22 bp, Artificial Sequence
  Detection primer for CDKN2B
ggttggttgaaggaatagaaat

SEQ ID NO: 428 - DNA, 22 bp, Artificial Sequence
  Detection primer for CDKN2B
cccactaaacatacccttattc

SEQ ID NO: 429 - DNA, 21 bp, Artificial Sequence
  Detection primer for CD44
gaaaggagaggttaaaggttg

SEQ ID NO: 430 - DNA, 21 bp, Artificial Sequence
  Detection primer for CD44
aactcacttaactccaatccc

SEQ ID NO: 431 - DNA, 22 bp, Artificial Sequence
  Detection primer for CSPG2
ggataggagttgggattaagat

SEQ ID NO: 432 - DNA, 22 bp, Artificial Sequence
  Detection primer for CSPG2
aaatctttttcaacaccaaaat

SEQ ID NO: 433 - DNA, 22 bp, Artificial Sequence
  Detection primer for DAPK1
aaccctttcttcaaattacaaa

SEQ ID NO: 434 - DNA, 21 bp, Artificial Sequence
  Detection primer for DAPK1
tgattgggttttagggaaata

SEQ ID NO: 435 - DNA, 22 bp, Artificial Sequence
  Detection primer for EGFR
gggtttggttgtaatatggatt

SEQ ID NO: 436 - DNA, 19 bp, Artificial Sequence
  Detection primer for EGFR
cccaacactacccctctaa

SEQ ID NO: 437 - DNA, 21 bp, Artificial Sequence
  Detection primer for EYA4
ggaagaggtgattaaatggat

SEQ ID NO: 438 - DNA, 19 bp, Artificial Sequence
  Detection primer for EYA4
cccaaaaatcaaacaacaa

SEQ ID NO: 439 - DNA, 19 bp, Artificial Sequence
  Detection primer for GSTP1
atttgggaaagagggaaag

SEQ ID NO: 440 - DNA, 21 bp, Artificial Sequence
  Detection primer for GSTP1
taaaaactctaaaccccatcc

SEQ ID NO: 441 - DNA, 19 bp, Artificial Sequence
  Detection primer for GTBP/MSH6
ccctacccaccaatatacc

SEQ ID NO: 442 - DNA, 21 bp, Artificial Sequence
  Detection primer for GTBP/MSH6
agatttggggaagaagttgta

SEQ ID NO: 443 - DNA, 20 bp, Artificial Sequence
  Detection primer for HIC-1
tgggttggagaagaagttta

SEQ ID NO: 444 - DNA, 21 bp, Artificial Sequence
  Detection primer for HIC-1
tcatatttccaaaaacacacc

SEQ ID NO: 445 - DNA, 23 bp, Artificial Sequence
  Detection primer for HRAS
cttattcccatctaaaccctatt

SEQ ID NO: 446 - DNA, 22 bp, Artificial Sequence
  Detection primer for HRAS
gtggttttgtgaagttttaggt

SEQ ID NO: 447 - DNA, 20 bp, Artificial Sequence
  Detection primer for IGF2
cccttccccttaactaaact

SEQ ID NO: 448 - DNA, 19 bp, Artificial Sequence
  Detection primer for IGF2
aatttgggttaggtttgga

SEQ ID NO: 449 - DNA, 22 bp, Artificial Sequence
  Detection primer for LKB1
taaaagaaggatttttgattgg

SEQ ID NO: 450 - DNA, 21 bp, Artificial Sequence
  Detection primer for LKB1
catcttatttacctccctccc

SEQ ID NO: 451 - DNA, 22 bp, Artificial Sequence
  Detection primer for MGMT
aaggttttagggaagagtgttt

SEQ ID NO: 452 - DNA, 23 bp, Artificial Sequence
  Detection primer for MGMT
accttttcctatcacaaaaataa

SEQ ID NO: 453 - DNA, 20 bp, Artificial Sequence
  Detection primer for MLH1
taaggggagaggaggagttt

SEQ ID NO: 454 - DNA, 22 bp, Artificial Sequence
  Detection primer for MLH1
accaattctcaatcatctcttt

SEQ ID NO: 455 - DNA, 22 bp, Artificial Sequence
  Detection primer for MNCA9
gggaagtaggttagggttagtt

SEQ ID NO: 456 - DNA, 22 bp, Artificial Sequence
  Detection primer for MNCA9
aaatcctcctctccaaataaat

SEQ ID NO: 457 - DNA, 18 bp, Artificial Sequence
  Detection primer for MSH3
tgtttgggattgggtagg

SEQ ID NO: 458 - DNA, 23 bp, Artificial Sequence
  Detection primer for MSH3
cataacctttacctatctcctca

SEQ ID NO: 459 - DNA, 22 bp, Artificial Sequence
  Detection primer for MYC
agagggagtaaaagaaaatggt

SEQ ID NO: 460 - DNA, 22 bp, Artificial Sequence
  Detection primer for MYC
ccaaataaacaaaataacctcc

SEQ ID NO: 461 - DNA, 22 bp, Artificial Sequence
  Detection primer for N33
ttttagattgaggttttagggt

SEQ ID NO: 462 - DNA, 22 bp, Artificial Sequence
  Detection primer for N33
atccattctacctcctttttct

SEQ ID NO: 463 - DNA, 18 bp, Artificial Sequence
  Detection primer for PAX6
ggaggggagagggttatg

SEQ ID NO: 464 - DNA, 22 bp, Artificial Sequence
  Detection primer for PAX6
tactatacacaccccaaaacaa

SEQ ID NO: 465 - DNA, 19 bp, Artificial Sequence
  Detection primer for PGR
ttttgggaatgggttgtat

SEQ ID NO: 466 - DNA, 21 bp, Artificial Sequence
  Detection primer for PGR
ctacccttaacctccatccta

SEQ ID NO: 467 - DNA, 26 bp, Artificial Sequence
  Detection primer for PTEN
ttttaggtagttatattgggtatgtt

SEQ ID NO: 468 - DNA, 21 bp, Artificial Sequence
  Detection primer for PTEN
tcaactctcaaacttccatca

SEQ ID NO: 469 - DNA, 22 bp, Artificial Sequence
  Detection primer for RARB
ttgttgggagtttttaagtttt

SEQ ID NO: 470 - DNA, 22 bp, Artificial Sequence
  Detection primer for RARB
caaattctccttccaaataaat

SEQ ID NO: 471 - DNA, 20 bp, Artificial Sequence
  Detection primer for SFN
gaagagaggagagggaggta

SEQ ID NO: 472 - DNA, 19 bp, Artificial Sequence
  Detection primer for SFN
ctatccaacaaacccaaca

SEQ ID NO: 473 - DNA, 22 bp, Artificial Sequence
  Detection primer for S100A2
gtttttaagttggagaagagga

SEQ ID NO: 474 - DNA, 22 bp, Artificial Sequence
  Detection primer for S100A2
acctataaatcacaacccactc

SEQ ID NO: 475 - DNA, 22 bp, Artificial Sequence
  Detection primer for TGFBR2
gtaatttgaagaaagttgaggg

SEQ ID NO: 476 - DNA, 22 bp, Artificial Sequence
  Detection primer for TGFBR2
ccaacaactaaacaaaacctct

SEQ ID NO: 477 - DNA, 22 bp, Artificial Sequence
  Detection primer for TIMP3
tgagaaaattgttgtttgaagt

SEQ ID NO: 478 - DNA, 22 bp, Artificial Sequence
  Detection primer for TIMP3
caaaataccctaaaaaccactc

SEQ ID NO: 479 - DNA, 20 bp, Artificial Sequence
  Detection primer for TP53
ggagttgtattgttgggaga

SEQ ID NO: 480 - DNA, 21 bp, Artificial Sequence
  Detection primer for TP53
taaaaccccaattttcactaa

SEQ ID NO: 481 - DNA, 24 bp, Artificial Sequence
  Detection primer for TP73
agtaaatagtgggtgagttatgaa

SEQ ID NO: 482 - DNA, 25 bp, Artificial Sequence
  Detection primer for TP73
gaaaaacctctaaaaactactctcc

SEQ ID NO: 483 - DNA, 26 bp, Artificial Sequence
  Detection primer for VHL
tgtaaaatgaataaagttaatgagtg

SEQ ID NO: 484 - DNA, 23 bp, Artificial Sequence
  Detection primer for VHL
tcctaaattcaaataatcctcct

SEQ ID NO: 485 - DNA, 22 bp, Artificial Sequence
  Detection primer for CDKN1C
ggggaggtagatatttggataa

SEQ ID NO: 486 - DNA, 23 bp, Artificial Sequence
  Detection primer for CDKN1C
aactacaccatttatattcccac

SEQ ID NO: 487 - DNA, 22 bp, Artificial Sequence
  Detection primer for CAV1
gttagtatgtttgggggtaaat

SEQ ID NO: 488 - DNA, 22 bp, Artificial Sequence
  Detection primer for CAV1
ataaataacaccttccacccta

SEQ ID NO: 489 - DNA, 22 bp, Artificial Sequence
  Detection primer for CDH13
tttgtattaggttggaagtggt

SEQ ID NO: 490 - DNA, 22 bp, Artificial Sequence
  Detection primer for CDH13
cccaaataaatcaacaacaaca

SEQ ID NO: 491 - DNA, 22 bp, Artificial Sequence
  Detection primer for DRG1
ggttttgggtttagtggtaaat

SEQ ID NO: 492 - DNA, 22 bp, Artificial Sequence
  Detection primer for DRG1
aactttcataactcaccctttc

SEQ ID NO: 493 - DNA, 22 bp, Artificial Sequence
  Detection primer for PTGS2
gatttttggagaggaagttaag

SEQ ID NO: 494 - DNA, 22 bp, Artificial Sequence
  Detection primer for PTGS2
aaaactaaaaaccaaacccata

SEQ ID NO: 495 - DNA, 20 bp, Artificial Sequence
  Detection primer for THBS1
tggggttagtttaggatagg

SEQ ID NO: 496 - DNA, 25 bp, Artificial Sequence
  Detection primer for THBS1
cttaaaaacactaaaacttctcaaa

SEQ ID NO: 497 - DNA, 21 bp, Artificial Sequence
  Detection primer for TPEF (=TMEFF2; =HPP1)
ttgtttgggttaataaatgga

SEQ ID NO: 498 - DNA, 20 bp, Artificial Sequence
  Detection primer for TPEF (=TMEFF2; =HPP1)
cttctctcttctcccctctc

SEQ ID NO: 499 - DNA, 18 bp, Artificial Sequence
  Detection primer for DNMT1
tccccatcacacctaaaa

SEQ ID NO: 500 - DNA, 18 bp, Artificial Sequence
  Detection primer for DNMT1
gggaggaggggatgtatt

SEQ ID NO: 501 - DNA, 22 bp, Artificial Sequence
  Detection primer for CEA
tatgggaggaggttagtaagtg

SEQ ID NO: 502 - DNA, 22 bp, Artificial Sequence
  Detection primer for CEA
ccccaaatcctacatataaaaa

SEQ ID NO: 503 - DNA, 21 bp, Artificial Sequence
  Detection primer for MB
gtttttggtaaaggggtagaa

SEQ ID NO: 504 - DNA, 22 bp, Artificial Sequence
  Detection primer for MB
cctaaaatatcaacctccacct

SEQ ID NO: 505 - DNA, 23 bp, Artificial Sequence
  Detection primer for PCNA
tttttaggttgtaaggaggtttt

SEQ ID NO: 506 - DNA, 22 bp, Artificial Sequence
  Detection primer for PCNA
taaatacctccaacacctttct

SEQ ID NO: 507 - DNA, 25 bp, Artificial Sequence
  Detection primer for CDC2
attagaagtgaaagtaatggaattt

SEQ ID NO: 508 - DNA, 19 bp, Artificial Sequence
  Detection primer for CDC2
tcaatttccaaaaaccaac

SEQ ID NO: 509 - DNA, 22 bp, Artificial Sequence
  Detection primer for ESR1
agggggaattaaatagaaagag

SEQ ID NO: 510 - DNA, 22 bp, Artificial Sequence
  Detection primer for ESR1
caataaaaccatcccaaatact

SEQ ID NO: 511 - DNA, 22 bp, Artificial Sequence
  Detection primer for CASP8
agtggatttggagtttagatgt

SEQ ID NO: 512 - DNA, 22 bp, Artificial Sequence
  Detection primer for CASP8
aacaaaataaaaacttctccca

SEQ ID NO: 513 - DNA, 24 bp, Artificial Sequence
  Detection primer for RASSF1
acctctctacaaattacaaattca

SEQ ID NO: 514 - DNA, 20 bp, Artificial Sequence
  Detection primer for RASSF1
agtttgggttagtttgggtt

SEQ ID NO: 515 - DNA, 21 bp, Artificial Sequence
  Detection primer for MSH4
aggatgttgaggtttgagatt

SEQ ID NO: 516 - DNA, 21 bp, Artificial Sequence
  Detection primer for MSH4
cactataataaccaccaccca

SEQ ID NO: 517 - DNA, 22 bp, Artificial Sequence
  Detection primer for MSH5
tattaggaataaagttggggag

SEQ ID NO: 518 - DNA, 22 bp, Artificial Sequence
  Detection primer for MSH5
aacccttcaaacaaaaataaaa

SEQ ID NO: 519 - DNA, 18 bp, Artificial Sequence
  Detection oligonucleotide for MDR1
ttggtggtcgttttaagg

SEQ ID NO: 520 - DNA, 18 bp, Artificial Sequence
  Detection oligonucleotide for MDR1
ttggtggttgttttaagg

SEQ ID NO: 521 - DNA, 18 bp, Artificial Sequence
  Detection oligonucleotide for MDR1
ttgaaagacgtgtttata

SEQ ID NO: 522 - DNA, 18 bp, Artificial Sequence
  Detection oligonucleotide for MDR1
ttgaaagatgtgtttata

SEQ ID NO: 523 - DNA, 18 bp, Artificial Sequence
  Detection oligonucleotide for MDR1
aggtgtaacggaagttag

SEQ ID NO: 524 - DNA, 18 bp, Artificial Sequence
  Detection oligonucleotide for MDR1
aggtgtaatggaagttag

SEQ ID NO: 525 - DNA, 18 bp, Artificial Sequence
  Detection oligonucleotide for MDR1
tagtttttcgaggaatta

SEQ ID NO: 526 - DNA, 18 bp, Artificial Sequence
  Detection oligonucleotide for MDR1
tagttttttgaggaatta

SEQ ID NO: 527 - DNA, 18 bp, Artificial Sequence
  Detection oligonucleotide for APOC2
gagagtttcgtttttgtt

SEQ ID NO: 528 - DNA, 18 bp, Artificial Sequence
  Detection oligonucleotide for APOC2
gagagttttgtttttgtt

SEQ ID NO: 529 - DNA, 18 bp, Artificial Sequence
  Detection oligonucleotide for APOC2
ttgggggacgttattgtt

SEQ ID NO: 530 - DNA, 18 bp, Artificial Sequence
  Detection oligonucleotide for APOC2
ttgggggatgttattgtt

SEQ ID NO: 531 - DNA, 18 bp, Artificial Sequence
  Detection oligonucleotide for APOC2
tgtgttcgttcggagttg

SEQ ID NO: 532 - DNA, 18 bp, Artificial Sequence
  Detection oligonucleotide for APOC2
tgtgtttgtttggagttg

SEQ ID NO: 533 - DNA, 18 bp, Artificial Sequence
  Detection oligonucleotide for APOC2
tgggtttgcggagaatgg

SEQ ID NO: 534 - DNA, 18 bp, Artificial Sequence
  Detection oligonucleotide for APOC2
tgggtttgtggagaatgg

SEQ ID NO: 535 - DNA, 18 bp, Artificial Sequence
  Detection oligonucleotide for CACNA1G
tttaggagcgttaatgtg

SEQ ID NO: 536 - DNA, 18 bp, Artificial Sequence
  Detection oligonucleotide for CACNA1G
tttaggagtgttaatgtg

SEQ ID NO: 537 - DNA, 18 bp, Artificial Sequence
  Detection oligonucleotide for CACNA1G
tagggttacgaggttagg

SEQ ID NO: 538 - DNA, 18 bp, Artificial Sequence
  Detection oligonucleotide for CACNA1G
tagggttatgaggttagg

SEQ ID NO: 539 - DNA, 18 bp, Artificial Sequence
  Detection oligonucleotide for CACNA1G
ggaggttacgtttagatt

SEQ ID NO: 540 - DNA, 18 bp, Artificial Sequence
  Detection oligonucleotide for CACNA1G
ggaggttatgtttagatt

SEQ ID NO: 541 - DNA, 18 bp, Artificial Sequence
  Detection oligonucleotide for CACNA1G
ttaggggtcgtggataaa

SEQ ID NO: 542 - DNA, 18 bp, Artificial Sequence
  Detection oligonucleotide for CACNA1G
ttaggggttgtggataaa

SEQ ID NO: 543 - DNA, 18 bp, Artificial Sequence
  Detection oligonucleotide for EGR4
ggtgggaagcgtatttat

SEQ ID NO: 544 - DNA, 18 bp, Artificial Sequence
  Detection oligonucleotide for EGR4
ggtgggaagtgtatttat

SEQ ID NO: 545 - DNA, 18 bp, Artificial Sequence
  Detection oligonucleotide for EGR4
ttatagttcgagtttttt

SEQ ID NO: 546 - DNA, 18 bp, Artificial Sequence
  Detection oligonucleotide for EGR4
ttatagtttgagtttttt

SEQ ID NO: 547 - DNA, 18 bp, Artificial Sequence
  Detection oligonucleotide for AR
tgttatttcgagagaggt

SEQ ID NO: 548 - DNA, 18 bp, Artificial Sequence
  Detection oligonucleotide for AR
tgttattttgagagaggt

SEQ ID NO: 549 - DNA, 18 bp, Artificial Sequence
  Detection oligonucleotide for AR
attttgagcgaggttagt

SEQ ID NO: 550 - DNA, 18 bp, Artificial Sequence
  Detection oligonucleotide for AR
attttgagtgaggttagt

SEQ ID NO: 551 - DNA, 18 bp, Artificial Sequence
  Detection oligonucleotide for AR
gtagtattcgaaggtagt

SEQ ID NO: 552 - DNA, 18 bp, Artificial Sequence
  Detection oligonucleotide for AR
gtagtatttgaaggtagt

SEQ ID NO: 553 - DNA, 18 bp, Artificial Sequence
  Detection oligonucleotide for RB1
ttagatttcgggataggg

SEQ ID NO: 554 - DNA, 18 bp, Artificial Sequence
  Detection oligonucleotide for RB1
ttagattttgggataggg

SEQ ID NO: 555 - DNA, 18 bp, Artificial Sequence
  Detection oligonucleotide for RB1
tatagtttcgttaagtgt

SEQ ID NO: 556 - DNA, 18 bp, Artificial Sequence
  Detection oligonucleotide for RB1
tatagttttgttaagtgt

SEQ ID NO: 557 - DNA, 18 bp, Artificial Sequence
  Detection oligonucleotide for RB1
gtgtatttcggtttggag

SEQ ID NO: 558 - DNA, 18 bp, Artificial Sequence
  Detection oligonucleotide for RB1
gtgtattttggtttggag

SEQ ID NO: 559 - DNA, 18 bp, Artificial Sequence
  Detection oligonucleotide for RB1
tggatttacgttaggttt

SEQ ID NO: 560 - DNA, 18 bp, Artificial Sequence
  Detection oligonucleotide for RB1
tggatttatgttaggttt

SEQ ID NO: 561 - DNA, 18 bp, Artificial Sequence
  Detection oligonucleotide for GPIb beta
tgttatttgtcgttgtag

SEQ ID NO: 562 - DNA, 18 bp, Artificial Sequence
  Detection oligonucleotide for GPIb beta
tgttatttgttgttgtag

SEQ ID NO: 563 - DNA, 18 bp, Artificial Sequence
  Detection oligonucleotide for GPIb beta
gtgggagcggaagtttga

SEQ ID NO: 564 - DNA, 18 bp, Artificial Sequence
  Detection oligonucleotide for GPIb beta
gtgggagtggaagtttga

SEQ ID NO: 565 - DNA, 18 bp, Artificial Sequence
  Detection oligonucleotide for GPIb beta
tagagtaagtcgggttgt

SEQ ID NO: 566 - DNA, 19 bp, Artificial Sequence
  Detection oligonucleotide for GPIb beta
tagagtaagtcgggttgtt

SEQ ID NO: 567 - DNA, 18 bp, Artificial Sequence
  Detection oligonucleotide for GPIb beta
ggttaggtcgtagtattg

SEQ ID NO: 568 - DNA, 18 bp, Artificial Sequence
  Detection oligonucleotide for GPIb beta
ggttaggttgtagtattg

SEQ ID NO: 569 - DNA, 18 bp, Artificial Sequence
  Detection oligonucleotide for MYOD1
atagtagtcgggtgttgg

SEQ ID NO: 570 - DNA, 18 bp, Artificial Sequence
  Detection oligonucleotide for MYOD1
atagtagttgggtgttgg

SEQ ID NO: 571 - DNA, 18 bp, Artificial Sequence
  Detection oligonucleotide for MYOD1
tagttgttcgtttgggtt

SEQ ID NO: 572 - DNA, 18 bp, Artificial Sequence
  Detection oligonucleotide for MYOD1
tagttgtttgtttgggtt

SEQ ID NO: 573 - DNA, 18 bp, Artificial Sequence
  Detection oligonucleotide for WT1
tttagtttcgatttttgg

SEQ ID NO: 574 - DNA, 18 bp, Artificial Sequence
  Detection oligonucleotide for WT1
tttagttttgatttttgg

SEQ ID NO: 575 - DNA, 18 bp, Artificial Sequence
  Detection oligonucleotide for HLA-F
atagggtacgttaaggtt

SEQ ID NO: 576 - DNA, 18 bp, Artificial Sequence
  Detection oligonucleotide for HLA-F
atagggtatgttaaggtt

SEQ ID NO: 577 - DNA, 18 bp, Artificial Sequence
  Detection oligonucleotide for HLA-F
gagagaaacggtttttgt

SEQ ID NO: 578 - DNA, 18 bp, Artificial Sequence
  Detection oligonucleotide for HLA-F
gagagaaatggtttttgt

SEQ ID NO: 579 - DNA, 18 bp, Artificial Sequence
  Detection oligonucleotide for ELK1
tgtttaatcgtagagttg

SEQ ID NO: 580 - DNA, 18 bp, Artificial Sequence
  Detection oligonucleotide for ELK1
tgtttaattgtagagttg

SEQ ID NO: 581 - DNA, 18 bp, Artificial Sequence
  Detection oligonucleotide for ELK1
tttgttttcgttgagtag

SEQ ID NO: 582 - DNA, 18 bp, Artificial Sequence
  Detection oligonucleotide for ELK1
tttgtttttgttgagtag

SEQ ID NO: 583 - DNA, 18 bp, Artificial Sequence
  Detection oligonucleotide for ELK1
gaagggttcgttttttaa

SEQ ID NO: 584 - DNA, 18 bp, Artificial Sequence
  Detection oligonucleotide for ELK1
gaagggtttgttttttaa

SEQ ID NO: 585 - DNA, 18 bp, Artificial Sequence
  Detection oligonucleotide for ELK1
attaatagcgttttggtt

SEQ ID NO: 586 - DNA, 18 bp, Artificial Sequence
  Detection oligonucleotide for ELK1
attaatagtgttttggtt

SEQ ID NO: 587 - DNA, 18 bp, Artificial Sequence
  Detection oligonucleotide for APC
tatttagcggattatata

SEQ ID NO: 588 - DNA, 18 bp, Artificial Sequence
  Detection oligonucleotide for APC
tatttagtggattatata

SEQ ID NO: 589 - DNA, 18 bp, Artificial Sequence
  Detection oligonucleotide for APC
aaggttatcggtttaaga

SEQ ID NO: 590 - DNA, 18 bp, Artificial Sequence
  Detection oligonucleotide for APC
aaggttattggtttaaga

SEQ ID NO: 591 - DNA, 18 bp, Artificial Sequence
  Detection oligonucleotide for APC
gggggacgacgtttttgt

SEQ ID NO: 592 - DNA, 18 bp, Artificial Sequence
  Detection oligonucleotide for APC
gggggatgatgtttttgt

SEQ ID NO: 593 - DNA, 18 bp, Artificial Sequence
  Detection oligonucleotide for BCL2
agtgtttcgcgtgattga

SEQ ID NO: 594 - DNA, 18 bp, Artificial Sequence
  Detection oligonucleotide for BCL2
agtgttttgtgtgattga

SEQ ID NO: 595 - DNA, 18 bp, Artificial Sequence
  Detection oligonucleotide for BCL2
taagttgtcgtagagggg

SEQ ID NO: 596 - DNA, 18 bp, Artificial Sequence
  Detection oligonucleotide for BCL2
taagttgttgtagagggg

SEQ ID NO: 597 - DNA, 18 bp, Artificial Sequence
  Detection oligonucleotide for BCL2
ggatttcgtcgttgtaga

SEQ ID NO: 598 - DNA, 18 bp, Artificial Sequence
  Detection oligonucleotide for BCL2
ggattttgttgttgtaga

SEQ ID NO: 599 - DNA, 18 bp, Artificial Sequence
  Detection oligonucleotide for CALCA
gagggtgacgtaatttag

SEQ ID NO: 600 - DNA, 18 bp, Artificial Sequence
  Detection oligonucleotide for CALCA
gagggtgatgtaatttag

SEQ ID NO: 601 - DNA, 18 bp, Artificial Sequence
  Detection oligonucleotide for CALCA
tgtattggcggaattttt

SEQ ID NO: 602 - DNA, 18 bp, Artificial Sequence
  Detection oligonucleotide for CALCA
tgtattggtggaattttt

SEQ ID NO: 603 - DNA, 18 bp, Artificial Sequence
  Detection oligonucleotide for CALCA
gttagtttcgggatattt

SEQ ID NO: 604 - DNA, 18 bp, Artificial Sequence
  Detection oligonucleotide for CALCA
gttagttttgggatattt

SEQ ID NO: 605 - DNA, 18 bp, Artificial Sequence
  Detection oligonucleotide for CDH1
tagaggatcgtttgagtt

SEQ ID NO: 606 - DNA, 18 bp, Artificial Sequence
  Detection oligonucleotide for CDH1
tagaggattgtttgagtt

SEQ ID NO: 607 - DNA, 18 bp, Artificial Sequence
  Detection oligonucleotide for CDH1
gttgtgatcgtattattg

SEQ ID NO: 608 - DNA, 18 bp, Artificial Sequence
  Detection oligonucleotide for CDH1
gttgtgattgtattattg

SEQ ID NO: 609 - DNA, 18 bp, Artificial Sequence
  Detection oligonucleotide for CDH1
ttgggattcgaatttagt

SEQ ID NO: 610 - DNA, 18 bp, Artificial Sequence
  Detection oligonucleotide for CDH1
ttgggatttgaatttagt

SEQ ID NO: 611 - DNA, 18 bp, Artificial Sequence
  Detection oligonucleotide for CDKN1A
aggtgtatcgtttttata

SEQ ID NO: 612 - DNA, 18 bp, Artificial Sequence
  Detection oligonucleotide for CDKN1A
aggtgtattgtttttata

SEQ ID NO: 613 - DNA, 18 bp, Artificial Sequence
  Detection oligonucleotide for CDKN1A
tgggttagcggtgagtta

SEQ ID NO: 614 - DNA, 18 bp, Artificial Sequence
  Detection oligonucleotide for CDKN1A
tgggttagtggtgagtta

SEQ ID NO: 615 - DNA, 18 bp, Artificial Sequence
  Detection oligonucleotide for CDKN1A
gtttatttcgtggggaaa

SEQ ID NO: 616 - DNA, 18 bp, Artificial Sequence
  Detection oligonucleotide for CDKN1A
gtttattttgtggggaaa

SEQ ID NO: 617 - DNA, 18 bp, Artificial Sequence
  Detection oligonucleotide for CDKN1A
ttggaattcggttaggtt

SEQ ID NO: 618 - DNA, 18 bp, Artificial Sequence
  Detection oligonucleotide for CDKN1A
ttggaatttggttaggtt

SEQ ID NO: 619 - DNA, 18 bp, Artificial Sequence
  Detection oligonucleotide for CDKN1B (p27 Kip1)
aagagaaacgttggaata

SEQ ID NO: 620 - DNA, 18 bp, Artificial Sequence
  Detection oligonucleotide for CDKN1B (p27 Kip1)
aagagaaatgttggaata

SEQ ID NO: 621 - DNA, 18 bp, Artificial Sequence
  Detection oligonucleotide for CDKN1B (p27 Kip1)
tttgatttcgaggggagt

SEQ ID NO: 622 - DNA, 18 bp, Artificial Sequence
  Detection oligonucleotide for CDKN1B (p27 Kip1)
tttgattttgaggggagt

SEQ ID NO: 623 - DNA, 18 bp, Artificial Sequence
  Detection oligonucleotide for CDKN1B (p27 Kip1)
gtatttggcggttggatt

SEQ ID NO: 624 - DNA, 18 bp, Artificial Sequence
  Detection oligonucleotide for CDKN1B (p27 Kip1)
gtatttggtggttggatt

SEQ ID NO: 625 - DNA, 18 bp, Artificial Sequence
  Detection oligonucleotide for CDKN1B (p27 Kip1)
tataatttcgggaaagaa

SEQ ID NO: 626 - DNA, 18 bp, Artificial Sequence
  Detection oligonucleotide for CDKN1B (p27 Kip1)
tataattttgggaaagaa

SEQ ID NO: 627 - DNA, 18 bp, Artificial Sequence
  Detection oligonucleotide for CDKN2a
agagtgaacgtatttaaa

SEQ ID NO: 628 - DNA, 18 bp, Artificial Sequence
  Detection oligonucleotide for CDKN2a
agagtgaatgtatttaaa

SEQ ID NO: 629 - DNA, 18 bp, Artificial Sequence
  Detection oligonucleotide for CDKN2a
gatagggtcggagggggt

SEQ ID NO: 630 - DNA, 18 bp, Artificial Sequence
  Detection oligonucleotide for CDKN2a
gatagggttggagggggt

SEQ ID NO: 631 - DNA, 18 bp, Artificial Sequence
  Detection oligonucleotide for CDKN2B
atatttagcgagtagtgt

SEQ ID NO: 632 - DNA, 18 bp, Artificial Sequence
  Detection oligonucleotide for CDKN2B
atatttagtgagtagtgt

SEQ ID NO: 633 - DNA, 18 bp, Artificial Sequence
  Detection oligonucleotide for CDKN2B
atagggggcggagtttaa

SEQ ID NO: 634 - DNA, 18 bp, Artificial Sequence
  Detection oligonucleotide for CDKN2B
atagggggtggagtttaa

SEQ ID NO: 635 - DNA, 18 bp, Artificial Sequence
  Detection oligonucleotide for CDKN2B
ttattgtacggggtttta

SEQ ID NO: 636 - DNA, 18 bp, Artificial Sequence
  Detection oligonucleotide for CDKN2B
ttattgtatggggtttta

SEQ ID NO: 637 - DNA, 18 bp, Artificial Sequence
  Detection oligonucleotide for CDKN2B
ttttaagtcgtagaagga

SEQ ID NO: 638 - DNA, 18 bp, Artificial Sequence
  Detection oligonucleotide for CDKN2B
ttttaagttgtagaagga

SEQ ID NO: 639 - DNA, 18 bp, Artificial Sequence
  Detection oligonucleotide for CD44
ggtagtttcgattattta

SEQ ID NO: 640 - DNA, 18 bp, Artificial Sequence
  Detection oligonucleotide for CD44
ggtagttttgattattta

SEQ ID NO: 641 - DNA, 18 bp, Artificial Sequence
  Detection oligonucleotide for CD44
tggtggtacgtagtttgg

SEQ ID NO: 642 - DNA, 18 bp, Artificial Sequence
  Detection oligonucleotide for CD44
tggtggtatgtagtttgg

SEQ ID NO: 643 - DNA, 18 bp, Artificial Sequence
  Detection oligonucleotide for CSPG2
atgtgattcgtttgggta

SEQ ID NO: 644 - DNA, 18 bp, Artificial Sequence
  Detection oligonucleotide for CSPG2
atgtgatttgtttgggta

SEQ ID NO: 645 - DNA, 18 bp, Artificial Sequence
  Detection oligonucleotide for DAPK1
gttggagtcgaggtttga

SEQ ID NO: 646 - DNA, 18 bp, Artificial Sequence
  Detection oligonucleotide for DAPK1
gttggagttgaggtttga

SEQ ID NO: 647 - DNA, 18 bp, Artificial Sequence
  Detection oligonucleotide for DAPK1
ttttttgtcggattggtg

SEQ ID NO: 648 - DNA, 18 bp, Artificial Sequence
  Detection oligonucleotide for DAPK1
ttttttgttggattggtg

SEQ ID NO: 649 - DNA, 18 bp, Artificial Sequence
  Detection oligonucleotide for EGFR
gatgatttcgagggtgtt

SEQ ID NO: 650 - DNA, 18 bp, Artificial Sequence
  Detection oligonucleotide for EGFR
gatgattttgagggtgtt

SEQ ID NO: 651 - DNA, 18 bp, Artificial Sequence
  Detection oligonucleotide for EGFR
gagggtttcgtagtgttg

SEQ ID NO: 652 - DNA, 18 bp, Artificial Sequence
  Detection oligonucleotide for EGFR
gagggttttgtagtgttg

SEQ ID NO: 653 - DNA, 18 bp, Artificial Sequence
  Detection oligonucleotide for EGFR
tggggattcgaataaagg

SEQ ID NO: 654 - DNA, 18 bp, Artificial Sequence
  Detection oligonucleotide for EGFR
tggggatttgaataaagg

SEQ ID NO: 655 - DNA, 18 bp, Artificial Sequence
  Detection oligonucleotide for EYA4
tatatatacgtgtgggta

SEQ ID NO: 656 - DNA, 18 bp, Artificial Sequence
  Detection oligonucleotide for EYA4
tatatatatgtgtgggta

SEQ ID NO: 657 - DNA, 18 bp, Artificial Sequence
  Detection oligonucleotide for EYA4
tttagatacgaaatgtta

SEQ ID NO: 658 - DNA, 18 bp, Artificial Sequence
  Detection oligonucleotide for EYA4
tttagatatgaaatgtta

SEQ ID NO: 659 - DNA, 18 bp, Artificial Sequence
  Detection oligonucleotide for GSTP1
ggttttttcggttagttg

SEQ ID NO: 660 - DNA, 18 bp, Artificial Sequence
  Detection oligonucleotide for GSTP1
ggtttttttggttagttg

SEQ ID NO: 661 - DNA, 18 bp, Artificial Sequence
  Detection oligonucleotide for GSTP1
gtagttttcgttattagt

SEQ ID NO: 662 - DNA, 18 bp, Artificial Sequence
  Detection oligonucleotide for GSTP1
gtagtttttgttattagt

SEQ ID NO: 663 - DNA, 18 bp, Artificial Sequence
  Detection oligonucleotide for GTBP/MSH6
ttttgtcggacggagttt

SEQ ID NO: 664 - DNA, 18 bp, Artificial Sequence
  Detection oligonucleotide for GTBP/MSH6
ttttgttggatggagttt

SEQ ID NO: 665 - DNA, 18 bp, Artificial Sequence
  Detection oligonucleotide for GTBP/MSH6
aaggtttaatcgttttgt

SEQ ID NO: 666 - DNA, 18 bp, Artificial Sequence
  Detection oligonucleotide for GTBP/MSH6
aaggtttaattgttttgt

SEQ ID NO: 667 - DNA, 18 bp, Artificial Sequence
  Detection oligonucleotide for HIC-1
ttaaaacggcgtataggg

SEQ ID NO: 668 - DNA, 18 bp, Artificial Sequence
  Detection oligonucleotide for HIC-1
ttaaaatggtgtataggg

SEQ ID NO: 669 - DNA, 18 bp, Artificial Sequence
  Detection oligonucleotide for HIC-1
aggagattcgaaagttta

SEQ ID NO: 670 - DNA, 18 bp, Artificial Sequence
  Detection oligonucleotide for HIC-1
aggagatttgaaagttta

SEQ ID NO: 671 - DNA, 18 bp, Artificial Sequence
  Detection oligonucleotide for HRAS
atagtgggcgtaattggt

SEQ ID NO: 672 - DNA, 18 bp, Artificial Sequence
  Detection oligonucleotide for HRAS
atagtgggtgtaattggt

SEQ ID NO: 673 - DNA, 18 bp, Artificial Sequence
  Detection oligonucleotide for HRAS
aaattggacgtttagttg

SEQ ID NO: 674 - DNA, 18 bp, Artificial Sequence
  Detection oligonucleotide for HRAS
aaattggatgtttagttg

SEQ ID NO: 675 - DNA, 18 bp, Artificial Sequence
  Detection oligonucleotide for HRAS
tagaagtcgagagatttg

SEQ ID NO: 676 - DNA, 18 bp, Artificial Sequence
  Detection oligonucleotide for HRAS
tagaagttgagagatttg

SEQ ID NO: 677 - DNA, 18 bp, Artificial Sequence
  Detection oligonucleotide for HRAS
gaatatttcgaagtttgt

SEQ ID NO: 678 - DNA, 18 bp, Artificial Sequence
  Detection oligonucleotide for HRAS
gaatattttgaagtttgt

SEQ ID NO: 679 - DNA, 18 bp, Artificial Sequence
  Detection oligonucleotide for IGF2
ggttattacgataatttg

SEQ ID NO: 680 - DNA, 18 bp, Artificial Sequence
  Detection oligonucleotide for IGF2
ggttattatgataatttg

SEQ ID NO: 681 - DNA, 18 bp, Artificial Sequence
  Detection oligonucleotide for IGF2
tggagtttacggaggttt

SEQ ID NO: 682 - DNA, 18 bp, Artificial Sequence
  Detection oligonucleotide for IGF2
tggagtttatggaggttt

SEQ ID NO: 683 - DNA, 18 bp, Artificial Sequence
  Detection oligonucleotide for LKB1
ttaattaacgggtgggta

SEQ ID NO: 684 - DNA, 18 bp, Artificial Sequence
  Detection oligonucleotide for LKB1
ttaattaatgggtgggta

SEQ ID NO: 685 - DNA, 18 bp, Artificial Sequence
  Detection oligonucleotide for MGMT
taaggatacgagttatat

SEQ ID NO: 686 - DNA, 18 bp, Artificial Sequence
  Detection oligonucleotide for MGMT
taaggatatgagttatat

SEQ ID NO: 687 - DNA, 18 bp, Artificial Sequence
  Detection oligonucleotide for MGMT
ttggagagcggttgagtt

SEQ ID NO: 688 - DNA, 18 bp, Artificial Sequence
  Detection oligonucleotide for MGMT
ttggagagtggttgagtt

SEQ ID NO: 689 - DNA, 18 bp, Artificial Sequence
  Detection oligonucleotide for MGMT
taggttatcggtgattgt

SEQ ID NO: 690 - DNA, 18 bp, Artificial Sequence
  Detection oligonucleotide for MGMT
taggttattggtgattgt

SEQ ID NO: 691 - DNA, 18 bp, Artificial Sequence
  Detection oligonucleotide for MGMT
taggggagcggttttagg

SEQ ID NO: 692 - DNA, 18 bp, Artificial Sequence
  Detection oligonucleotide for MGMT
taggggagtggttttagg

SEQ ID NO: 693 - DNA, 18 bp, Artificial Sequence
  Detection oligonucleotide for MLH1
ttgagaagcgttaagtat

SEQ ID NO: 694 - DNA, 18 bp, Artificial Sequence
  Detection oligonucleotide for MLH1
ttgagaagtgttaagtat

SEQ ID NO: 695 - DNA, 18 bp, Artificial Sequence
  Detection oligonucleotide for MLH1
gtagtagtcgttttaggg

SEQ ID NO: 696 - DNA, 18 bp, Artificial Sequence
  Detection oligonucleotide for MLH1
gtagtagttgttttaggg

SEQ ID NO: 697 - DNA, 18 bp, Artificial Sequence
  Detection oligonucleotide for MLH1
atagttgtcgttgaaggg

SEQ ID NO: 698 - DNA, 18 bp, Artificial Sequence
  Detection oligonucleotide for MLH1
atagttgttgttgaaggg

SEQ ID NO: 699 - DNA, 18 bp, Artificial Sequence
  Detection oligonucleotide for MLH1
ttggatggcgtaagttat

SEQ ID NO: 700 - DNA, 18 bp, Artificial Sequence
  Detection oligonucleotide for MLH1
ttggatggtgtaagttat

SEQ ID NO: 701 - DNA, 18 bp, Artificial Sequence
  Detection oligonucleotide for MNCA9
taaaagggcgttttgtga

SEQ ID NO: 702 - DNA, 18 bp, Artificial Sequence
  Detection oligonucleotide for MNCA9
taaaagggtgttttgtga

SEQ ID NO: 703 - DNA, 18 bp, Artificial Sequence
  Detection oligonucleotide for MNCA9
tagttagtcgtatggttt

SEQ ID NO: 704 - DNA, 18 bp, Artificial Sequence
  Detection oligonucleotide for MNCA9
tagttagttgtatggttt

SEQ ID NO: 705 - DNA, 18 bp, Artificial Sequence
  Detection oligonucleotide for MNCA9
gatttattcggagaggag

SEQ ID NO: 706 - DNA, 18 bp, Artificial Sequence
  Detection oligonucleotide for MNCA9
gatttatttggagaggag

SEQ ID NO: 707 - DNA, 18 bp, Artificial Sequence
  Detection oligonucleotide for MSH3
atttttcgttcgatgata

SEQ ID NO: 708 - DNA, 18 bp, Artificial Sequence
  Detection oligonucleotide for MSH3
attttttgtttgatgata

SEQ ID NO: 709 - DNA, 18 bp, Artificial Sequence
  Detection oligonucleotide for MSH3
agtttagtcggggttata

SEQ ID NO: 710 - DNA, 18 bp, Artificial Sequence
  Detection oligonucleotide for MSH3
agtttagttggggttata

SEQ ID NO: 711 - DNA, 18 bp, Artificial Sequence
  Detection oligonucleotide for MSH3
gggtgaagcgttgaggtt

SEQ ID NO: 712 - DNA, 18 bp, Artificial Sequence
  Detection oligonucleotide for MSH3
gggtgaagtgttgaggtt

SEQ ID NO: 713 - DNA, 18 bp, Artificial Sequence
  Detection oligonucleotide for MYC
ttagagtgttcggttgtt

SEQ ID NO: 714 - DNA, 18 bp, Artificial Sequence
  Detection oligonucleotide for MYC
ttagagtgtttggttgtt

SEQ ID NO: 715 - DNA, 18 bp, Artificial Sequence
  Detection oligonucleotide for MYC
aggattttcgagttgtgt

SEQ ID NO: 716 - DNA, 18 bp, Artificial Sequence
  Detection oligonucleotide for MYC
aggatttttgagttgtgt

SEQ ID NO: 717 - DNA, 18 bp, Artificial Sequence
  Detection oligonucleotide for MYC
aattttagcgagaggtag

SEQ ID NO: 718 - DNA, 18 bp, Artificial Sequence
  Detection oligonucleotide for MYC
aattttagtgagaggtag

SEQ ID NO: 719 - DNA, 18 bp, Artificial Sequence
  Detection oligonucleotide for PAX6
tattgtttcggttgttag

SEQ ID NO: 720 - DNA, 18 bp, Artificial Sequence
  Detection oligonucleotide for PAX6
tattgttttggttgttag

SEQ ID NO: 721 - DNA, 18 bp, Artificial Sequence
  Detection oligonucleotide for PAX6
gttagtagcgagtttagg

SEQ ID NO: 722 - DNA, 18 bp, Artificial Sequence
  Detection oligonucleotide for PAX6
gttagtagtgagtttagg

SEQ ID NO: 723 - DNA, 18 bp, Artificial Sequence
  Detection oligonucleotide for PAX6
agagtttagcgtattttt

SEQ ID NO: 724 - DNA, 18 bp, Artificial Sequence
  Detection oligonucleotide for PAX6
agagtttagtgtattttt

SEQ ID NO: 725 - DNA, 18 bp, Artificial Sequence
  Detection oligonucleotide for PGR
gaatttagcgagggattg

SEQ ID NO: 726 - DNA, 18 bp, Artificial Sequence
  Detection oligonucleotide for PGR
gaatttagtgagggattg

SEQ ID NO: 727 - DNA, 18 bp, Artificial Sequence
  Detection oligonucleotide for PGR
agtatgtacgagtttgat

SEQ ID NO: 728 - DNA, 18 bp, Artificial Sequence
  Detection oligonucleotide for PGR
agtatgtatgagtttgat

SEQ ID NO: 729 - DNA, 18 bp, Artificial Sequence
  Detection oligonucleotide for PGR
gggataaacgatagttat

SEQ ID NO: 730 - DNA, 18 bp, Artificial Sequence
  Detection oligonucleotide for PGR
gggataaatgatagttat

SEQ ID NO: 731 - DNA, 18 bp, Artificial Sequence
  Detection oligonucleotide for PTEN
agagtttgcggtttgggg

SEQ ID NO: 732 - DNA, 19 bp, Artificial Sequence
  Detection oligonucleotide for PTEN
agagtttgtggtttggggt

SEQ ID NO: 733 - DNA, 18 bp, Artificial Sequence
  Detection oligonucleotide for RARB
gggtttatcgaaagttta

SEQ ID NO: 734 - DNA, 18 bp, Artificial Sequence
  Detection oligonucleotide for RARB
gggtttattgaaagttta

SEQ ID NO: 735 - DNA, 18 bp, Artificial Sequence
  Detection oligonucleotide for RARB
agtttattcgtatatatt

SEQ ID NO: 736 - DNA, 18 bp, Artificial Sequence
  Detection oligonucleotide for RARB
agtttatttgtatatatt

SEQ ID NO: 737 - DNA, 18 bp, Artificial Sequence
  Detection oligonucleotide for RARB
tttttatgcgagttgttt

SEQ ID NO: 738 - DNA, 18 bp, Artificial Sequence
  Detection oligonucleotide for RARB
tttttatgtgagttgttt

SEQ ID NO: 739 - DNA, 18 bp, Artificial Sequence
  Detection oligonucleotide for SFN
atagagttcggtattggt

SEQ ID NO: 740 - DNA, 18 bp, Artificial Sequence
  Detection oligonucleotide for SFN
atagagtttggtattggt

SEQ ID NO: 741 - DNA, 18 bp, Artificial Sequence
  Detection oligonucleotide for SFN
gtaggtcgaacgttatga

SEQ ID NO: 742 - DNA, 18 bp, Artificial Sequence
  Detection oligonucleotide for SFN
gtaggttgaatgttatga

SEQ ID NO: 743 - DNA, 18 bp, Artificial Sequence
  Detection oligonucleotide for SFN
aaaagtaacgaggagggt

SEQ ID NO: 744 - DNA, 18 bp, Artificial Sequence
  Detection oligonucleotide for SFN
aaaagtaatgaggagggt

SEQ ID NO: 745 - DNA, 18 bp, Artificial Sequence
  Detection oligonucleotide for S100A2
tttaattgcggttgtgtg

SEQ ID NO: 746 - DNA, 18 bp, Artificial Sequence
  Detection oligonucleotide for S100A2
tttaattgtggttgtgtg

SEQ ID NO: 747 - DNA, 18 bp, Artificial Sequence
  Detection oligonucleotide for S100A2
tatataggcgtatgtatg

SEQ ID NO: 748 - DNA, 18 bp, Artificial Sequence
  Detection oligonucleotide for S100A2
tatataggtgtatgtatg

SEQ ID NO: 749 - DNA, 18 bp, Artificial Sequence
  Detection oligonucleotide for S100A2
agttttagcgtgtgttta

SEQ ID NO: 750 - DNA, 18 bp, Artificial Sequence
  Detection oligonucleotide for S100A2
agttttagtgtgtgttta

SEQ ID NO: 751 - DNA, 18 bp, Artificial Sequence
  Detection oligonucleotide for TGFBR2
atttggagcgaggaattt

SEQ ID NO: 752 - DNA, 18 bp, Artificial Sequence
  Detection oligonucleotide for TGFBR2
atttggagtgaggaattt

SEQ ID NO: 753 - DNA, 18 bp, Artificial Sequence
  Detection oligonucleotide for TGFBR2
ttgaaagtcggttaaagt

SEQ ID NO: 754 - DNA, 18 bp, Artificial Sequence
  Detection oligonucleotide for TGFBR2
ttgaaagttggttaaagt

SEQ ID NO: 755 - DNA, 18 bp, Artificial Sequence
  Detection oligonucleotide for TGFBR2
ggtagttacgagagagtt

SEQ ID NO: 756 - DNA, 18 bp, Artificial Sequence
  Detection oligonucleotide for TGFBR2
ggtagttatgagagagtt

SEQ ID NO: 757 - DNA, 18 bp, Artificial Sequence
  Detection oligonucleotide for TIMP3
aggtttttcgttggagaa

SEQ ID NO: 758 - DNA, 18 bp, Artificial Sequence
  Detection oligonucleotide for TIMP3
aggttttttgttggagaa

SEQ ID NO: 759 - DNA, 18 bp, Artificial Sequence
  Detection oligonucleotide for TIMP3
gaaaatatcggtattttg

SEQ ID NO: 760 - DNA, 18 bp, Artificial Sequence
  Detection oligonucleotide for TIMP3
gaaaatattggtattttg

SEQ ID NO: 761 - DNA, 18 bp, Artificial Sequence
  Detection oligonucleotide for TIMP3
gggataagcgaatttttt

SEQ ID NO: 762 - DNA, 18 bp, Artificial Sequence
  Detection oligonucleotide for TIMP3
gggataagtgaatttttt

SEQ ID NO: 763 - DNA, 18 bp, Artificial Sequence
  Detection oligonucleotide for TIMP3
ttttattacgtatgtttt

SEQ ID NO: 764 - DNA, 18 bp, Artificial Sequence
  Detection oligonucleotide for TIMP3
ttttattatgtatgtttt

SEQ ID NO: 765 - DNA, 18 bp, Artificial Sequence
  Detection oligonucleotide for TP53
aagttgaacgtttaggta

SEQ ID NO: 766 - DNA, 18 bp, Artificial Sequence
  Detection oligonucleotide for TP53
aagttgaatgtttaggta

SEQ ID NO: 767 - DNA, 18 bp, Artificial Sequence
  Detection oligonucleotide for TP53
ttttgagtcggtttaaag

SEQ ID NO: 768 - DNA, 18 bp, Artificial Sequence
  Detection oligonucleotide for TP53
ttttgagttggtttaaag

SEQ ID NO: 769 - DNA, 18 bp, Artificial Sequence
  Detection oligonucleotide for TP53
tatttattcggtgttggg

SEQ ID NO: 770 - DNA, 18 bp, Artificial Sequence
  Detection oligonucleotide for TP53
tatttatttggtgttggg

SEQ ID NO: 771 - DNA, 18 bp, Artificial Sequence
  Detection oligonucleotide for TP53
ttggatttcgaaatattg

SEQ ID NO: 772 - DNA, 18 bp, Artificial Sequence
  Detection oligonucleotide for TP53
ttggattttgaaatattg

SEQ ID NO: 773 - DNA, 18 bp, Artificial Sequence
  Detection oligonucleotide for TP73
tgatttagcgtaggtttg

SEQ ID NO: 774 - DNA, 18 bp, Artificial Sequence
  Detection oligonucleotide for TP73
tgatttagtgtaggtttg

SEQ ID NO: 775 - DNA, 18 bp, Artificial Sequence
  Detection oligonucleotide for TP73
ttagagttcgagtttata

SEQ ID NO: 776 - DNA, 18 bp, Artificial Sequence
  Detection oligonucleotide for TP73
ttagagtttgagtttata

SEQ ID NO: 777 - DNA, 18 bp, Artificial Sequence
  Detection oligonucleotide for TP73
ggaagtttcgatggttta

SEQ ID NO: 778 - DNA, 18 bp, Artificial Sequence
  Detection oligonucleotide for TP73
ggaagttttgatggttta

SEQ ID NO: 779 - DNA, 18 bp, Artificial Sequence
  Detection oligonucleotide for VHL
tttataagcgtgatgatt

SEQ ID NO: 780 - DNA, 18 bp, Artificial Sequence
  Detection oligonucleotide for VHL
tttataagtgtgatgatt

SEQ ID NO: 781 - DNA, 18 bp, Artificial Sequence
  Detection oligonucleotide for VHL
ggtgttttcgtgtgagat

SEQ ID NO: 782 - DNA, 18 bp, Artificial Sequence
  Detection oligonucleotide for VHL
ggtgtttttgtgtgagat

SEQ ID NO: 783 - DNA, 18 bp, Artificial Sequence
  Detection oligonucleotide for VHL
tgtgagatgcgttatttt

SEQ ID NO: 784 - DNA, 18 bp, Artificial Sequence
  Detection oligonucleotide for VHL
tgtgagatgtgttatttt

SEQ ID NO: 785 - DNA, 18 bp, Artificial Sequence
  Detection oligonucleotide for VHL
tatattgcgcgtttgata

SEQ ID NO: 786 - DNA, 18 bp, Artificial Sequence
  Detection oligonucleotide for VHL
tatattgtgtgtttgata

SEQ ID NO: 787 - DNA, 18 bp, Artificial Sequence
  Detection oligonucleotide for CDKN1C
atgaagaacggttaaggg

SEQ ID NO: 788 - DNA, 18 bp, Artificial Sequence
  Detection oligonucleotide for CDKN1C
atgaagaatggttaaggg

SEQ ID NO: 789 - DNA, 18 bp, Artificial Sequence
  Detection oligonucleotide for CDKN1C
ttttatttcgagttaggt

SEQ ID NO: 790 - DNA, 18 bp, Artificial Sequence
  Detection oligonucleotide for CDKN1C
ttttattttgagttaggt

SEQ ID NO: 791 - DNA, 18 bp, Artificial Sequence
  Detection oligonucleotide for CDKN1C
ttaagttacggttattag

SEQ ID NO: 792 - DNA, 18 bp, Artificial Sequence
  Detection oligonucleotide for CDKN1C
ttaagttatggttattag

SEQ ID NO: 793 - DNA, 18 bp, Artificial Sequence
  Detection oligonucleotide for CDKN1C
ttagtgttcgtttggaat

SEQ ID NO: 794 - DNA, 18 bp, Artificial Sequence
  Detection oligonucleotide for CDKN1C
ttagtgtttgtttggaat

SEQ ID NO: 795 - DNA, 18 bp, Artificial Sequence
  Detection oligonucleotide for CAV1
ttggtatcgttgaagaat

SEQ ID NO: 796 - DNA, 18 bp, Artificial Sequence
  Detection oligonucleotide for CAV1
ttggtattgttgaagaat

SEQ ID NO: 797 - DNA, 18 bp, Artificial Sequence
  Detection oligonucleotide for CAV1
tgggggttcgaaaaagtg

SEQ ID NO: 798 - DNA, 18 bp, Artificial Sequence
  Detection oligonucleotide for CAV1
tgggggtttgaaaaagtg

SEQ ID NO: 799 - DNA, 18 bp, Artificial Sequence
  Detection oligonucleotide for CAV1
gaagtgttcgtttttgtt

SEQ ID NO: 800 - DNA, 18 bp, Artificial Sequence
  Detection oligonucleotide for CAV1
gaagtgtttgtttttgtt

SEQ ID NO: 801 - DNA, 18 bp, Artificial Sequence
  Detection oligonucleotide for CDH13
gaagtggtcgttagtttt

SEQ ID NO: 802 - DNA, 19 bp, Artificial Sequence
  Detection oligonucleotide for CDH13
gaagtggttgttagttttt

SEQ ID NO: 803 - DNA, 18 bp, Artificial Sequence
  Detection oligonucleotide for CDH13
ttgtttagcgtgatttgt

SEQ ID NO: 804 - DNA, 18 bp, Artificial Sequence
  Detection oligonucleotide for CDH13
ttgtttagtgtgatttgt

SEQ ID NO: 805 - DNA, 18 bp, Artificial Sequence
  Detection oligonucleotide for DRG1
gagtaggacggtgttaag

SEQ ID NO: 806 - DNA, 18 bp, Artificial Sequence
  Detection oligonucleotide for DRG1
gagtaggatggtgttaag

SEQ ID NO: 807 - DNA, 18 bp, Artificial Sequence
  Detection oligonucleotide for DRG1
aaatttaacgttgggtag

SEQ ID NO: 808 - DNA, 18 bp, Artificial Sequence
  Detection oligonucleotide for DRG1
aaatttaatgttgggtag

SEQ ID NO: 809 - DNA, 18 bp, Artificial Sequence
  Detection oligonucleotide for DRG1
gataatgacggtgttagt

SEQ ID NO: 810 - DNA, 18 bp, Artificial Sequence
  Detection oligonucleotide for DRG1
gataatgatggtgttagt

SEQ ID NO: 811 - DNA, 18 bp, Artificial Sequence
  Detection oligonucleotide for DRG1
tggttgtacgttaggagt

SEQ ID NO: 812 - DNA, 18 bp, Artificial Sequence
  Detection oligonucleotide for DRG1
tggttgtatgttaggagt

SEQ ID NO: 813 - DNA, 18 bp, Artificial Sequence
  Detection oligonucleotide for PTGS2
atttaaggcgattagttt

SEQ ID NO: 814 - DNA, 18 bp, Artificial Sequence
  Detection oligonucleotide for PTGS2
atttaaggtgattagttt

SEQ ID NO: 815 - DNA, 18 bp, Artificial Sequence
  Detection oligonucleotide for THBS1
ggagagttagcgagggtt

SEQ ID NO: 816 - DNA, 18 bp, Artificial Sequence
  Detection oligonucleotide for THBS1
ggagagttagtgagggtt

SEQ ID NO: 817 - DNA, 18 bp, Artificial Sequence
  Detection oligonucleotide for THBS1
tattttaacgaatggttt

SEQ ID NO: 818 - DNA, 18 bp, Artificial Sequence
  Detection oligonucleotide for THBS1
tattttaatgaatggttt

SEQ ID NO: 819 - DNA, 18 bp, Artificial Sequence
  Detection oligonucleotide for THBS1
ttataaaacgggtttagt

SEQ ID NO: 820 - DNA, 18 bp, Artificial Sequence
  Detection oligonucleotide for THBS1
ttataaaatgggtttagt

SEQ ID NO: 821 - DNA, 18 bp, Artificial Sequence
  Detection oligonucleotide for THBS1
aggtatttcgggagatta

SEQ ID NO: 822 - DNA, 18 bp, Artificial Sequence
  Detection oligonucleotide for THBS1
aggtattttgggagatta

SEQ ID NO: 823 - DNA, 18 bp, Artificial Sequence
  Detection oligonucleotide for DNMT1
agtgggttcgtttaagtt

SEQ ID NO: 824 - DNA, 18 bp, Artificial Sequence
  Detection oligonucleotide for DNMT1
agtgggtttgtttaagtt

SEQ ID NO: 825 - DNA, 18 bp, Artificial Sequence
  Detection oligonucleotide for DNMT1
ttttttacgcggagtagt

SEQ ID NO: 826 - DNA, 18 bp, Artificial Sequence
  Detection oligonucleotide for DNMT1
ttttttatgtggagtagt

SEQ ID NO: 827 - DNA, 18 bp, Artificial Sequence
  Detection oligonucleotide for DNMT1
gagagaggcgatattttg

SEQ ID NO: 828 - DNA, 18 bp, Artificial Sequence
  Detection oligonucleotide for DNMT1
gagagaggtgatattttg

SEQ ID NO: 829 - DNA, 18 bp, Artificial Sequence
  Detection oligonucleotide for DNMT1
gtattaaacggagagagg

SEQ ID NO: 830 - DNA, 18 bp, Artificial Sequence
  Detection oligonucleotide for DNMT1
gtattaaatggagagagg

SEQ ID NO: 831 - DNA, 18 bp, Artificial Sequence
  Detection oligonucleotide for CEA
ttttgagtcgtagtttag

SEQ ID NO: 832 - DNA, 18 bp, Artificial Sequence
  Detection oligonucleotide for CEA
ttttgagttgtagtttag

SEQ ID NO: 833 - DNA, 18 bp, Artificial Sequence
  Detection oligonucleotide for CEA
aatagatacggagaggga

SEQ ID NO: 834 - DNA, 18 bp, Artificial Sequence
  Detection oligonucleotide for CEA
aatagatatggagaggga

SEQ ID NO: 835 - DNA, 18 bp, Artificial Sequence
  Detection oligonucleotide for MB
agaaggtgcgtgagaggt

SEQ ID NO: 836 - DNA, 18 bp, Artificial Sequence
  Detection oligonucleotide for MB
agaaggtgtgtgagaggt

SEQ ID NO: 837 - DNA, 18 bp, Artificial Sequence
  Detection oligonucleotide for MB
gggttagtcggggtattt

SEQ ID NO: 838 - DNA, 18 bp, Artificial Sequence
  Detection oligonucleotide for MB
gggttagttggggtattt

SEQ ID NO: 839 - DNA, 18 bp, Artificial Sequence
  Detection oligonucleotide for MB
ggggatagcgagttattg

SEQ ID NO: 840 - DNA, 18 bp, Artificial Sequence
  Detection oligonucleotide for MB
ggggatagtgagttattg

SEQ ID NO: 841 - DNA, 18 bp, Artificial Sequence
  Detection oligonucleotide for MB
ttagattgcgttatgggg

SEQ ID NO: 842 - DNA, 18 bp, Artificial Sequence
  Detection oligonucleotide for MB
ttagattgtgttatgggg

SEQ ID NO: 843 - DNA, 18 bp, Artificial Sequence
  Detection oligonucleotide for PCNA
tatggatacgattggttt

SEQ ID NO: 844 - DNA, 18 bp, Artificial Sequence
  Detection oligonucleotide for PCNA
tatggatatgattggttt

SEQ ID NO: 845 - DNA, 18 bp, Artificial Sequence
  Detection oligonucleotide for PCNA
gtattaaacggttgtagg

SEQ ID NO: 846 - DNA, 18 bp, Artificial Sequence
  Detection oligonucleotide for PCNA
gtattaaatggttgtagg

SEQ ID NO: 847 - DNA, 18 bp, Artificial Sequence
  Detection oligonucleotide for PCNA
tttgaagtcgaaattagt

SEQ ID NO: 848 - DNA, 18 bp, Artificial Sequence
  Detection oligonucleotide for PCNA
tttgaagttgaaattagt

SEQ ID NO: 849 - DNA, 18 bp, Artificial Sequence
  Detection oligonucleotide for CDC2
tggaatttcgatgtaaat

SEQ ID NO: 850 - DNA, 18 bp, Artificial Sequence
  Detection oligonucleotide for CDC2
tggaattttgatgtaaat

SEQ ID NO: 851 - DNA, 18 bp, Artificial Sequence
  Detection oligonucleotide for CDC2
tagtaggacgatattttt

SEQ ID NO: 852 - DNA, 18 bp, Artificial Sequence
  Detection oligonucleotide for CDC2
tagtaggatgatattttt

SEQ ID NO: 853 - DNA, 18 bp, Artificial Sequence
  Detection oligonucleotide for CDC2
tagttattcgggaaggtt

SEQ ID NO: 854 - DNA, 18 bp, Artificial Sequence
  Detection oligonucleotide for CDC2
tagttatttgggaaggtt

SEQ ID NO: 855 - DNA, 18 bp, Artificial Sequence
  Detection oligonucleotide for CDC2
aaattgttcgtatttggt

SEQ ID NO: 856 - DNA, 18 bp, Artificial Sequence
  Detection oligonucleotide for CDC2
aaattgtttgtatttggt

SEQ ID NO: 857 - DNA, 18 bp, Artificial Sequence
  Detection oligonucleotide for ESR1
agatatatcggagtttgg

SEQ ID NO: 858 - DNA, 18 bp, Artificial Sequence
  Detection oligonucleotide for ESR1
agatatattggagtttgg

SEQ ID NO: 859 - DNA, 18 bp, Artificial Sequence
  Detection oligonucleotide for ESR1
gtttggtacggggtatat

SEQ ID NO: 860 - DNA, 18 bp, Artificial Sequence
  Detection oligonucleotide for ESR1
gtttggtatggggtatat

SEQ ID NO: 861 - DNA, 18 bp, Artificial Sequence
  Detection oligonucleotide for ESR1
ttttaaatcgagttgtgt

SEQ ID NO: 862 - DNA, 18 bp, Artificial Sequence
  Detection oligonucleotide for ESR1
ttttaaattgagttgtgt

SEQ ID NO: 863 - DNA, 18 bp, Artificial Sequence
  Detection oligonucleotide for ESR1
tatgagttcgggagatta

SEQ ID NO: 864 - DNA, 18 bp, Artificial Sequence
  Detection oligonucleotide for ESR1
tatgagtttgggagatta

SEQ ID NO: 865 - DNA, 18 bp, Artificial Sequence
  Detection oligonucleotide for CASP8
gaatgagtcgaggaaggt

SEQ ID NO: 866 - DNA, 18 bp, Artificial Sequence
  Detection oligonucleotide for CASP8
gaatgagttgaggaaggt

SEQ ID NO: 867 - DNA, 18 bp, Artificial Sequence
  Detection oligonucleotide for CASP8
tattgagacgttaagtaa

SEQ ID NO: 868 - DNA, 18 bp, Artificial Sequence
  Detection oligonucleotide for CASP8
tattgagatgttaagtaa

SEQ ID NO: 869 - DNA, 18 bp, Artificial Sequence
  Detection oligonucleotide for CASP8
taaggttacgtagttagt

SEQ ID NO: 870 - DNA, 18 bp, Artificial Sequence
  Detection oligonucleotide for CASP8
taaggttatgtagttagt

SEQ ID NO: 871 - DNA, 18 bp, Artificial Sequence
  Detection oligonucleotide for CASP8
gttaatagcggggatttt

SEQ ID NO: 872 - DNA, 18 bp, Artificial Sequence
  Detection oligonucleotide for CASP8
gttaatagtggggatttt

SEQ ID NO: 873 - DNA, 18 bp, Artificial Sequence
  Detection oligonucleotide for RASSF1
gtagttttcgagaatgtt

SEQ ID NO: 874 - DNA, 18 bp, Artificial Sequence
  Detection oligonucleotide for RASSF1
gtagtttttgagaatgtt

SEQ ID NO: 875 - DNA, 18 bp, Artificial Sequence
  Detection oligonucleotide for RASSF1
taattagaacgttttttg

SEQ ID NO: 876 - DNA, 18 bp, Artificial Sequence
  Detection oligonucleotide for RASSF1
taattagaatgttttttg

SEQ ID NO: 877 - DNA, 18 bp, Artificial Sequence
  Detection oligonucleotide for RASSF1
tagttttcgcgtagaatt

SEQ ID NO: 878 - DNA, 18 bp, Artificial Sequence
  Detection oligonucleotide for RASSF1
tagtttttgtgtagaatt

SEQ ID NO: 879 - DNA, 18 bp, Artificial Sequence
  Detection oligonucleotide for MSH4
ttgtttcggcggtttttt

SEQ ID NO: 880 - DNA, 18 bp, Artificial Sequence
  Detection oligonucleotide for MSH4
ttgttttggtggtttttt

SEQ ID NO: 881 - DNA, 18 bp, Artificial Sequence
  Detection oligonucleotide for MSH4
ttttggtacgttaggagt

SEQ ID NO: 882 - DNA, 18 bp, Artificial Sequence
  Detection oligonucleotide for MSH4
ttttggtatgttaggagt

SEQ ID NO: 883 - DNA, 18 bp, Artificial Sequence
  Detection oligonucleotide for MSH4
taaattttcggttagttt

SEQ ID NO: 884 - DNA, 18 bp, Artificial Sequence
  Detection oligonucleotide for MSH4
taaatttttggttagttt

SEQ ID NO: 885 - DNA, 18 bp, Artificial Sequence
  Detection oligonucleotide for MSH4
ttagaggtcggtagttta

SEQ ID NO: 886 - DNA, 18 bp, Artificial Sequence
  Detection oligonucleotide for MSH4
ttagaggttggtagttta

SEQ ID NO: 887 - DNA, 18 bp, Artificial Sequence
  Detection oligonucleotide for MSH5
atgtttatcgttttgagt

SEQ ID NO: 888 - DNA, 18 bp, Artificial Sequence
  Detection oligonucleotide for MSH5
atgtttattgttttgagt

SEQ ID NO: 889 - DNA, 18 bp, Artificial Sequence
  Detection oligonucleotide for MSH5
atagttgtcgaatgtatg

SEQ ID NO: 890 - DNA, 18 bp, Artificial Sequence
  Detection oligonucleotide for MSH5
atagttgttgaatgtatg

SEQ ID NO: 891 - DNA, 18 bp, Artificial Sequence
  Detection oligonucleotide for MSH5
tagaagtgcgaaggggta

SEQ ID NO: 892 - DNA, 18 bp, Artificial Sequence
  Detection oligonucleotide for MSH5
tagaagtgtgaaggggta

SEQ ID NO: 893 - DNA, 18 bp, Artificial Sequence
  Detection oligonucleotide for MSH5
atgtaattcgaatgtttt

SEQ ID NO: 894 - DNA, 18 bp, Artificial Sequence
  Detection oligonucleotide for MSH5
atgtaatttgaatgtttt

SEQ ID NO: 895 - DNA, 18 bp, Artificial Sequence
  Detection oligonucleotide for CDH13
aatgttttcgtgatgttg

SEQ ID NO: 896 - DNA, 18 bp, Artificial Sequence
  Detection oligonucleotide for CDH13
aatgtttttgtgatgttg

SEQ ID NO: 897 - DNA, 18 bp, Artificial Sequence
  Detection oligonucleotide for CD44
ttgtttagcggattttag

SEQ ID NO: 898 - DNA, 18 bp, Artificial Sequence
  Detection oligonucleotide for CD44
ttgtttagtggattttag

SEQ ID NO: 899 - DNA, 18 bp, Artificial Sequence
  Detection oligonucleotide for TPEF (=TMEFF2; =HPP1)
aatttgcgaacgtttggg

SEQ ID NO: 900 - DNA, 18 bp, Artificial Sequence
  Detection oligonucleotide for TPEF (=TMEFF2; =HPP1)
aatttgtgaatgtttggg

SEQ ID NO: 901 - DNA, 18 bp, Artificial Sequence
  Detection oligonucleotide for CSPG2
gggtaacgtcgaatttag

SEQ ID NO: 902 - DNA, 18 bp, Artificial Sequence
  Detection oligonucleotide for CSPG2
gggtaatgttgaatttag

SEQ ID NO: 903 - DNA, 18 bp, Artificial Sequence
  Detection oligonucleotide for CDH13
aaggaattcgttttgtaa

SEQ ID NO: 904 - DNA, 18 bp, Artificial Sequence
  Detection oligonucleotide for CDH13
aaggaatttgttttgtaa

SEQ ID NO: 905 - DNA, 18 bp, Artificial Sequence
  Detection oligonucleotide for GSTP1
ggagttcgcgggattttt

SEQ ID NO: 906 - DNA, 18 bp, Artificial Sequence
  Detection oligonucleotide for GSTP1
ggagtttgtgggattttt

SEQ ID NO: 907 - DNA, 18 bp, Artificial Sequence
  Detection oligonucleotide for TGFBR2
aaagttttcggaggggtt

SEQ ID NO: 908 - DNA, 18 bp, Artificial Sequence
  Detection oligonucleotide for TGFBR2
aaagtttttggaggggtt

SEQ ID NO: 909 - DNA, 18 bp, Artificial Sequence
  Detection oligonucleotide for N33
tgttatttcggagggttt

SEQ ID NO: 910 - DNA, 18 bp, Artificial Sequence
  Detection oligonucleotide for N33
tgttattttggagggttt

SEQ ID NO: 911 - DNA, 18 bp, Artificial Sequence
  Detection oligonucleotide for CAV1
tagattcggaggtaggta

SEQ ID NO: 912 - DNA, 18 bp, Artificial Sequence
  Detection oligonucleotide for CAV1
tagatttggaggtaggta

SEQ ID NO: 913 - DNA, 18 bp, Artificial Sequence
  Detection oligonucleotide for PTGS2
tttattttcgtgggtaaa

SEQ ID NO: 914 - DNA, 18 bp, Artificial Sequence
  Detection oligonucleotide for PTGS2
tttatttttgtgggtaaa

SEQ ID NO: 915 - DNA, 18 bp, Artificial Sequence
  Detection oligonucleotide for TP73
aagttacgggttttattg

SEQ ID NO: 916 - DNA, 18 bp, Artificial Sequence
  Detection oligonucleotide for TP73
aagttatgggttttattg

SEQ ID NO: 917 - DNA, 18 bp, Artificial Sequence
  Detection oligonucleotide for TPEF (=TMEFF2; =HPP1)
ataggttacgggttggag

SEQ ID NO: 918 - DNA, 18 bp, Artificial Sequence
  Detection oligonucleotide for TPEF (=TMEFF2; =HPP1)
ataggttatgggttggag

SEQ ID NO: 919 - DNA, 18 bp, Artificial Sequence
  Detection oligonucleotide for CD44
gtggggttcggaggtata

SEQ ID NO: 920 - DNA, 18 bp, Artificial Sequence
  Detection oligonucleotide for CD44
gtggggtttggaggtata

SEQ ID NO: 921 - DNA, 18 bp, Artificial Sequence
  Detection oligonucleotide for EYA4
aagtaagtcgttgttgtt

SEQ ID NO: 922 - DNA, 18 bp, Artificial Sequence
  Detection oligonucleotide for EYA4
aagtaagttgttgttgtt

SEQ ID NO: 923 - DNA, 18 bp, Artificial Sequence
  Detection oligonucleotide for EYA4
agtgtatgcgtagaaggt

SEQ ID NO: 924 - DNA, 18 bp, Artificial Sequence
  Detection oligonucleotide for EYA4
agtgtatgtgtagaaggt

SEQ ID NO: 925 - DNA, 18 bp, Artificial Sequence
  Detection oligonucleotide for GTBP/MSH6
tttgttggcgggaaattt

SEQ ID NO: 926 - DNA, 18 bp, Artificial Sequence
  Detection oligonucleotide for GTBP/MSH6
tttgttggtgggaaattt

SEQ ID NO: 927 - DNA, 18 bp, Artificial Sequence
  Detection oligonucleotide for EGR4
ggagttttcggtatatat

SEQ ID NO: 928 - DNA, 18 bp, Artificial Sequence
  Detection oligonucleotide for EGR4
ggagtttttggtatatat

SEQ ID NO: 929 - DNA, 18 bp, Artificial Sequence
  Detection oligonucleotide for CDH1
tagtggcgtcggaattgt

SEQ ID NO: 930 - DNA, 18 bp, Artificial Sequence
  Detection oligonucleotide for CDH1
tagtggtgttggaattgt

SEQ ID NO: 931 - DNA, 18 bp, Artificial Sequence
  Detection oligonucleotide for EGFR
atttggttcgatttggat

SEQ ID NO: 932 - DNA, 18 bp, Artificial Sequence
  Detection oligonucleotide for EGFR
atttggtttgatttggat

SEQ ID NO: 933 - DNA, 18 bp, Artificial Sequence
  Detection oligonucleotide for LKB1
agggaggtcgttggtatt

SEQ ID NO: 934 - DNA, 18 bp, Artificial Sequence
  Detection oligonucleotide for LKB1
agggaggttgttggtatt

SEQ ID NO: 935 - DNA, 18 bp, Artificial Sequence
  Detection oligonucleotide for DAPK1
ttgtttttcggaaatttg

SEQ ID NO: 936 - DNA, 18 bp, Artificial Sequence
  Detection oligonucleotide for DAPK1
ttgttttttggaaatttg

SEQ ID NO: 937 - DNA, 18 bp, Artificial Sequence
  Detection oligonucleotide for IGF2
gattagggcgggaaatat

SEQ ID NO: 938 - DNA, 18 bp, Artificial Sequence
  Detection oligonucleotide for IGF2
gattagggtgggaaatat

SEQ ID NO: 939 - DNA, 18 bp, Artificial Sequence
  Detection oligonucleotide for HLA-F
tatttgggcgggtgagtg

SEQ ID NO: 940 - DNA, 18 bp, Artificial Sequence
  Detection oligonucleotide for HLA-F
tatttgggtgggtgagtg

SEQ ID NO: 941 - DNA, 18 bp, Artificial Sequence
  Detection oligonucleotide for IGF2
ttgtatggtcgagtttat

SEQ ID NO: 942 - DNA, 18 bp, Artificial Sequence
  Detection oligonucleotide for IGF2
ttgtatggttgagtttat

SEQ ID NO: 943 - DNA, 18 bp, Artificial Sequence
  Detection oligonucleotide for N33
gtttagttagcgggtttt

SEQ ID NO: 944 - DNA, 18 bp, Artificial Sequence
  Detection oligonucleotide for N33
gtttagttagtgggtttt

SEQ ID NO: 945 - DNA, 18 bp, Artificial Sequence
  Detection oligonucleotide for CSPG2
aaaaattcgcgagtttag

SEQ ID NO: 946 - DNA, 18 bp, Artificial Sequence
  Detection oligonucleotide for CSPG2
aaaaatttgtgagtttag

SEQ ID NO: 947 - DNA, 18 bp, Artificial Sequence
  Detection oligonucleotide for PTEN
tgatgtggcgggattttt

SEQ ID NO: 948 - DNA, 18 bp, Artificial Sequence
  Detection oligonucleotide for PTEN
tgatgtggtgggattttt

SEQ ID NO: 949 - DNA, 18 bp, Artificial Sequence
  Detection oligonucleotide for MLH1
ttaggtagcgggtagtag

SEQ ID NO: 950 - DNA, 18 bp, Artificial Sequence
  Detection oligonucleotide for MLH1
ttaggtagtgggtagtag

SEQ ID NO: 951 - DNA, 18 bp, Artificial Sequence
  Detection oligonucleotide for GTBP/MSH6
gaggaattcgggttttag

SEQ ID NO: 952 - DNA, 18 bp, Artificial Sequence
  Detection oligonucleotide for GTBP/MSH6
gaggaatttgggttttag

SEQ ID NO: 953 - DNA, 18 bp, Artificial Sequence
  Detection oligonucleotide for CALCA
attaggttcgtgttttag

SEQ ID NO: 954 - DNA, 18 bp, Artificial Sequence
  Detection oligonucleotide for CALCA
attaggtttgtgttttag

SEQ ID NO: 955 - DNA, 18 bp, Artificial Sequence
  Detection oligonucleotide for DAPK1
gaagggagcgtattttat

SEQ ID NO: 956 - DNA, 18 bp, Artificial Sequence
  Detection oligonucleotide for DAPK1
gaagggagtgtattttat

SEQ ID NO: 957 - DNA, 18 bp, Artificial Sequence
  Detection oligonucleotide for PTEN
agagttatcgttttgttt

SEQ ID NO: 958 - DNA, 18 bp, Artificial Sequence
  Detection oligonucleotide for PTEN
agagttattgttttgttt

SEQ ID NO: 959 - DNA, 18 bp, Artificial Sequence
  Detection oligonucleotide for WT1
tgttatatcggttagttg

SEQ ID NO: 960 - DNA, 18 bp, Artificial Sequence
  Detection oligonucleotide for WT1
tgttatattggttagttg

SEQ ID NO: 961 - DNA, 18 bp, Artificial Sequence
  Detection oligonucleotide for EGFR
tttgtattcggagttggg

SEQ ID NO: 962 - DNA, 18 bp, Artificial Sequence
  Detection oligonucleotide for EGFR
tttgtatttggagttggg

SEQ ID NO: 963 - DNA, 18 bp, Artificial Sequence
  Detection oligonucleotide for CSPG2
aagattttcggttagttt

SEQ ID NO: 964 - DNA, 18 bp, Artificial Sequence
  Detection oligonucleotide for CSPG2
aagatttttggttagttt

SEQ ID NO: 965 - DNA, 18 bp, Artificial Sequence
  Detection oligonucleotide for LKB1
tttaggttcgtaagttta

SEQ ID NO: 966 - DNA, 18 bp, Artificial Sequence
  Detection oligonucleotide for LKB1
tttaggtttgtaagttta

SEQ ID NO: 967 - DNA, 18 bp, Artificial Sequence
  Detection oligonucleotide for WT1
tatattggcgaaggttaa

SEQ ID NO: 968 - DNA, 18 bp, Artificial Sequence
  Detection oligonucleotide for WT1
tatattggtgaaggttaa

SEQ ID NO: 969 - DNA, 18 bp, Artificial Sequence
  Detection oligonucleotide for ESR1
tggaggttcgggagttta

SEQ ID NO: 970 - DNA, 18 bp, Artificial Sequence
  Detection oligonucleotide for ESR1
tggaggtttgggagttta

SEQ ID NO: 971 - DNA, 18 bp, Artificial Sequence
  Detection oligonucleotide for APC
tttaatcgtatagtttgt

SEQ ID NO: 972 - DNA, 18 bp, Artificial Sequence
  Detection oligonucleotide for APC
tttaattgtatagtttgt

SEQ ID NO: 973 - DNA, 18 bp, Artificial Sequence
  Detection oligonucleotide for IGF2
agtttgaacgatgtaaga

SEQ ID NO: 974 - DNA, 18 bp, Artificial Sequence
  Detection oligonucleotide for IGF2
agtttgaatgatgtaaga

SEQ ID NO: 975 - DNA, 18 bp, Artificial Sequence
  Detection oligonucleotide for MYOD1
aattaggtcggataggag

SEQ ID NO: 976 - DNA, 18 bp, Artificial Sequence
  Detection oligonucleotide for MYOD1
aattaggttggataggag

SEQ ID NO: 977 - DNA, 18 bp, Artificial Sequence
  Detection oligonucleotide for N33
ttggttcgggaaaggtaa

SEQ ID NO: 978 - DNA, 18 bp, Artificial Sequence
  Detection oligonucleotide for N33
ttggtttgggaaaggtaa

SEQ ID NO: 979 - DNA, 18 bp, Artificial Sequence
  Detection oligonucleotide for TPEF (=TMEFF2; =HPP1)
atttgtttcgattaattt

SEQ ID NO: 980 - DNA, 18 bp, Artificial Sequence
  Detection oligonucleotide for TPEF (=TMEFF2; =HPP1)
atttgttttgattaattt

SEQ ID NO: 981 - DNA, 18 bp, Artificial Sequence
  Detection oligonucleotide for CDKN2a
aatagttacggtcggagg

SEQ ID NO: 982 - DNA, 18 bp, Artificial Sequence
  Detection oligonucleotide for CDKN2a
aatagttatggttggagg

SEQ ID NO: 983 - DNA, 18 bp, Artificial Sequence
  Detection oligonucleotide for CDH1
agggttatcgcgtttatg

SEQ ID NO: 984 - DNA, 18 bp, Artificial Sequence
  Detection oligonucleotide for CDH1
agggttattgtgtttatg

SEQ ID NO: 985 - DNA, 18 bp, Artificial Sequence
  Detection oligonucleotide for APC
tattttggcgggttgtat

SEQ ID NO: 986 - DNA, 18 bp, Artificial Sequence
  Detection oligonucleotide for APC
tattttggtgggttgtat

SEQ ID NO: 987 - DNA, 18 bp, Artificial Sequence
  Detection oligonucleotide for PTEN
attttgcgttcgtattta

SEQ ID NO: 988 - DNA, 18 bp, Artificial Sequence
  Detection oligonucleotide for PTEN
attttgtgtttgtattta

SEQ ID NO: 989 - DNA, 18 bp, Artificial Sequence
  Detection oligonucleotide for HLA-F
agttgtttcgtagatatt

SEQ ID NO: 990 - DNA, 18 bp, Artificial Sequence
  Detection oligonucleotide for HLA-F
agttgttttgtagatatt

SEQ ID NO: 991 - DNA, 18 bp, Artificial Sequence
  Detection oligonucleotide for RARB
tagtagttcgggtagggt

SEQ ID NO: 992 - DNA, 18 bp, Artificial Sequence
  Detection oligonucleotide for RARB
tagtagtttgggtagggt

SEQ ID NO: 993 - DNA, 18 bp, Artificial Sequence
  Detection oligonucleotide for N33
atttagttcgggggagga

SEQ ID NO: 994 - DNA, 18 bp, Artificial Sequence
  Detection oligonucleotide for N33
atttagtttgggggagga

SEQ ID NO: 995 - DNA, 18 bp, Artificial Sequence
  Detection oligonucleotide for RASSF1
tttgtagcgggtggagta

SEQ ID NO: 996 - DNA, 18 bp, Artificial Sequence
  Detection oligonucleotide for RASSF1
tttgtagtgggtggagta

SEQ ID NO: 997 - DNA, 18 bp, Artificial Sequence
  Detection oligonucleotide for CDKN2a
ggagttttcggttgattg

SEQ ID NO: 998 - DNA, 18 bp, Artificial Sequence
  Detection oligonucleotide for CDKN2a
ggagtttttggttgattg

SEQ ID NO: 999 - DNA, 18 bp, Artificial Sequence
  Detection oligonucleotide for S100A2
tatgtatacgagtattgg

SEQ ID NO: 1000 - DNA, 18 bp, Artificial Sequence
  Detection oligonucleotide for S100A2
tatgtatatgagtattgg

SEQ ID NO: 1001 - DNA, 18 bp, Artificial Sequence
  Detection oligonucleotide for MGMT
agtaggatcgggattttt

SEQ ID NO: 1002 - DNA, 18 bp, Artificial Sequence
  Detection oligonucleotide for MGMT
agtaggattgggattttt

SEQ ID NO: 1003 - DNA, 18 bp, Artificial Sequence
  Detection oligonucleotide for CEA
aagtgttcgcggttgttt

SEQ ID NO: 1004 - DNA, 18 bp, Artificial Sequence
  Detection oligonucleotide for CEA
aagtgtttgtggttgttt

SEQ ID NO: 1005 - DNA, 18 bp, Artificial Sequence
  Detection oligonucleotide for GPIb beta
ggagttcggtcgggtttt

SEQ ID NO: 1006 - DNA, 18 bp, Artificial Sequence
  Detection oligonucleotide for GPIb beta
ggagtttggttgggtttt

SEQ ID NO: 1007 - DNA, 18 bp, Artificial Sequence
  Detection oligonucleotide for PTGS2
agttatttcgttatatgg

SEQ ID NO: 1008 - DNA, 18 bp, Artificial Sequence
  Detection oligonucleotide for PTGS2
agttattttgttatatgg

SEQ ID NO: 1009 - DNA, 18 bp, Artificial Sequence
  Detection oligonucleotide for MYOD1
gtgttagtcgtttagggt

SEQ ID NO: 1010 - DNA, 18 bp, Artificial Sequence
  Detection oligonucleotide for MYOD1
gtgttagttgtttagggt

SEQ ID NO: 1011 - DNA, 18 bp, Artificial Sequence
  Detection oligonucleotide for PGR
ttaagtgtcggatttgtg

SEQ ID NO: 1012 - DNA, 18 bp, Artificial Sequence
  Detection oligonucleotide for PGR
ttaagtgttggatttgtg

SEQ ID NO: 1013 - DNA, 18 bp, Artificial Sequence
  Detection oligonucleotide for PCNA
taaagaggcggggagatt

SEQ ID NO: 1014 - DNA, 18 bp, Artificial Sequence
  Detection oligonucleotide for PCNA
taaagaggtggggagatt

SEQ ID NO: 1015 - DNA, 18 bp, Artificial Sequence
  Detection oligonucleotide for MSH3
agtattttcgtttgagga

SEQ ID NO: 1016 - DNA, 18 bp, Artificial Sequence
  Detection oligonucleotide for MSH3
agtatttttgtttgagga

SEQ ID NO: 1017 - DNA, 18 bp, Artificial Sequence
  Detection oligonucleotide for WT1
tagtgagacgaggttttt

SEQ ID NO: 1018 - DNA, 18 bp, Artificial Sequence
  Detection oligonucleotide for WT1
tagtgagatgaggttttt

SEQ ID NO: 1019 - DNA, 18 bp, Artificial Sequence
  Detection oligonucleotide for MYC
ttataatgcgagggtttg

SEQ ID NO: 1020 - DNA, 18 bp, Artificial Sequence
  Detection oligonucleotide for MYC
ttataatgtgagggtttg

SEQ ID NO: 1021 - DNA, 18 bp, Artificial Sequence
  Detection oligonucleotide for HIC-1
ttttagagcgttagggtt

SEQ ID NO: 1022 - DNA, 18 bp, Artificial Sequence
  Detection oligonucleotide for HIC-1
ttttagagtgttagggtt

SEQ ID NO: 1023 - DNA, 18 bp, Artificial Sequence
  Detection oligonucleotide for PTGS2
atatttggcggaaatttg

SEQ ID NO: 1024 - DNA, 18 bp, Artificial Sequence
  Detection oligonucleotide for PTGS2
atatttggtggaaatttg

SEQ ID NO: 1025 - DNA, 18 bp, Artificial Sequence
  Detection oligonucleotide for BCL2
ttttgttacggtggtgga

SEQ ID NO: 1026 - DNA, 18 bp, Artificial Sequence
  Detection oligonucleotide for BCL2
ttttgttatggtggtgga

SEQ ID NO: 1027 - DNA, 18 bp, Artificial Sequence
  Detection oligonucleotide for AR
agaggttgcgttttagag

SEQ ID NO: 1028 - DNA, 18 bp, Artificial Sequence
  Detection oligonucleotide for AR
agaggttgtgttttagag

SEQ ID NO: 1029 - DNA, 18 bp, Artificial Sequence
  Detection oligonucleotide for CDKN2a
gttgttttcggttggtgt

SEQ ID NO: 1030 - DNA, 18 bp, Artificial Sequence
  Detection oligonucleotide for CDKN2a
gttgtttttggttggtgt
